(19) United States
(12) Patent Application Publication
(10) Pub. No.: US 2023/0212587 A1
(43) Pub. Date: Jul. 6, 2023

(54) Mutant Hydroxyphenylpyruvate Dioxygenase Polypeptide, Encoding Gene Thereof and Use Therefor

(71) Applicant: Beijing Dabeinong Biotechnology Co., Ltd., Beiing, Haidian District (CN)

(72) Inventors: Xiang Xiao, Beijing (CN); Qing Tao, Beijing (CN); Caihong Yu, Beijing (CN); Qingfang Song, Beijing (CN); Xiaoming Bao, Beijing (CN)

(21) Appl. No.: 17/642,528

(22) PCT Filed: Sep. 17, 2019
(86) PCT No.: PCT/CN2019/106168

§ 371 Date: Aug. 30, 2022

(51) Int. Cl. C12N 15/52; C12N 15/82; C12N 9/02

(52) U.S. Cl. CPC C12N 15/52; C12N 9/0069; C12N 15/8274

(57) ABSTRACT

Provided is a mutant hydroxyphenylpyruvate dioxygenase (HPPD) polypeptide, an encoding gene thereof and a use thereof. The mutant HPPD polypeptide retains the activity of catalyzing the conversion of hydroxyphenylpyruvate acid into homogentisic acid or homogentisate, and the sensitivity to HPPD inhibitor herbicides is lower than that of original unmutated HPPD. On position 372 corresponding to the amino acid sequence represented by SEQ ID NO: 1, the mutant HPPD polypeptide comprises the following mutations: F372A, F372G, F372V, F372P, F372S, F372T, F372C, F372M, F372Q, F372D or F372 deletion. The described mutant can provide plants with high tolerance to HPPD inhibitor herbicides, and can be used to cultivate plants that are tolerant to HPPD inhibitor herbicides.

### FIELD OF THE INVENTION

[0001] The present invention relates to a mutant hydroxyphenylpyruvate dioxygenase polypeptide, a coding gene and use thereof, and in particular, to a mutant hydroxyphenylpyruvate dioxygenase polypeptide which is tolerant to HPPD-inhibitor herbicides, a coding gene and use thereof.

### BACKGROUND

[0002] The hydroxyphenylpyruvate dioxygenases (abbreviated as HPPDs) are enzymes which, in the presence of iron ion (Fe²⁺) and oxygen, catalyze the reaction in which 4-hydroxyphenylpyruvic acid (abbreviated as HPP), a tyrosine degradation product, is transformed into homogentisic acid / homogentisate (abbreviated as HG), the precursor in plants of tocopherol and plastoquinone (abbreviated as PQ). Tocopherol acts as a membrane-associated antioxidant. PQ not only acts as an electron carrier between PSII and the cytochrome b6/f complex, but also an essential cofactor for the phytoene desaturase involved in the biosynthesis of carotenoids.

[0003] Herbicides that act by inhibiting HPPD mainly include three chemical families: triketones, isoxazoles, and pyrazolinates. Inhibition of HPPD blocks the biosynthesis of PQ from tyrosine in plants, thereby resulting in the depletion of PQ and deficiency in carotenoids. HPPD-inhibiting herbicides are plant phloem-mobile bleachers which cause the light-exposed new meristems and leaves to emerge white. Carotenoids are essential for photo-protection. In the absence of carotenoids, the synthesis and function of chlorophyll will be disrupted by UV-radiation and reactive oxygen intermediates, thereby leading to plant growth suppression or even death.

[0004] Methods for providing plants that are tolerant to HPPD-inhibitor herbicides have included: 1) overexpressing the HPPD enzyme so as to produce quantities of HPPD enzyme in the plant that are sufficient in relation to HPPD-inhibitor herbicides so as to have enough of the functional enzyme available despite the presence of its inhibitor; and 2) mutating the target HPPD enzyme into a functional HPPD that is less sensitive to herbicides or their active metabolites but retains the capability of transforming into HG. With respect to mutant HPPDs, while a given mutant HPPD enzyme may provide a useful level of tolerance to some HPPD-inhibitor herbicides, the same mutant HPPD may be quite inadequate to provide commercial levels of tolerance to a different, more desirable HPPD-inhibitor herbicide. For example, HPPD-inhibitor herbicides may differ in terms of the spectrum of weeds they control, their manufacturing costs, and their environmental benefits. Accordingly, new methods and/or compositions for conferring HPPD-inhibitor herbicide tolerance upon various crops and crop varieties are needed.

### SUMMARY OF THE INVENTION

[0005] The object of the present invention is to provide a new mutant hydroxyphenylpyruvate dioxygenase polypeptide, a coding gene and use thereof. The mutant hydroxyphenylpyruvate dioxygenase polypeptide not only has HPPD enzymatic activity, but also enables the plants transformed with genes encoding the mutant hydroxyphenylpyruvate dioxygenase polypeptide to have good tolerance to HPPD-inhibitor herbicides.

[0006] To achieve the above object, the present invention provides a mutant hydroxyphenylpyruvate dioxygenase polypeptide which retains the activity of catalyzing the reaction of transforming 4-hydroxyphenylpyruvic acid into homogentisic acid or homogentisate and is less sensitive to an HPPD-inhibitor herbicide than the native unmutated HPPD, comprising the following mutation at a position corresponding to position 372 of the amino acid sequence as set forth in SEQ ID NO:1: F372A, F372G, F372V, F372P, F372S, F372T, F372C, F372M, F372Q, F372D, or F372 deletion;

[0007] Preferably, the mutant hydroxyphenylpyruvate dioxygenase polypeptide comprises the following mutation at a position corresponding to position 372 of the amino acid sequence as set forth in SEQ ID NO:1:F372A, F372G or F372V.

[0008] More preferably, the mutant hydroxyphenylpyruvate dioxygenase polypeptide comprises the following mutation at a position corresponding to position 372 of the amino acid sequence as set forth in SEQ ID NO:1: F372A.

[0009] Further, the mutant hydroxyphenylpyruvate dioxygenase polypeptide is derived from HPPDs in plants or microorganisms.

[0010] Preferably, the plant comprises monocotyledonous plants and dicotyledonous plants; more preferably, the plant is oats ( Avenasativa), wheat ( Triticumaestivum), barley ( Hordeumvulgare), millet ( Setariaitalica), corn ( Zeamays), sorghum ( Sorghumbicolor), Brachypodiumdistachyon, rice ( Oryzasativa), tobacco ( Nicotianatabacum), sunflower ( Helianthusannuus), alfalfa ( Medicagosativa), soybean ( Glycine max), cicerarietinum, peanut ( Arachishypogaea), sugar beet ( Betavulgaris), cucumber ( Cucumissativus), cotton ( Gossypiumhirsutum), oilseed rape ( Brassicanapus), potato ( Solariumtuberosum), tomato ( Solanumlycopersicum) or Arabidopsisthaliana;

[0011] Preferably, the microorganism is Cyanophyta, Pseudomonasfluorescens, or bacteria from the genus Sphingobium or Burkholderia.

[0012] Still further, when the native unmutated HPPD has an amino acid sequence as set forth in SEQ ID NO:1, the polypeptide further comprises the following mutation at position 372 of the amino acid sequence as set forth in SEQ ID NO:1: F372L, F372I, F372W, F372N, F372E or F372K.

[0013] On the basis of the above technical solution, the mutant hydroxyphenylpyruvate dioxygenase polypeptide comprises a second mutation;

[0014] Preferably, the second mutation at a position corresponding to position 413 of the amino acid sequence as set forth in SEQ ID NO:1 comprises the following mutation: G413W, G413H, G413M, G413F or G413C; more preferably, the second mutation at a position corresponding to position 413 of the amino acid sequence as set forth in SEQ ID NO:1 is G413W mutation;

[0015] Optionally, when the native unmutated HPPD has an amino acid sequence as set forth in SEQ ID NO:1, the second mutation at position 110 of the amino acid sequence as set forth in SEQ ID NO:1 is deletion mutation.

[0016] To achieve the above object, the present invention further provides a polynucleotide encoding the mutant hydroxyphenylpyruvate dioxygenase polypeptide.

[0017] To achieve the above object, the present invention further provides an expression cassette or a recombinant vector, comprising the polynucleotide under the regulation of effectively-linked regulatory sequences.

[0018] To achieve the above object, the present invention further provides a method for expanding the scope of herbicides to which the plants are tolerant, comprising expressing the mutant hydroxyphenylpyruvate dioxygenase polypeptide together with at least one herbicide-tolerant protein other than the mutant hydroxyphenylpyruvate dioxygenase polypeptide.

[0019] Further, the herbicide-tolerant protein is 5-enolpyruvylshikimate-3-phosphate synthase (EPSPS), glyphosate oxidoreductase, glyphosate-N-acetyltransferase, glyphosate decarboxylase, glufosinate acetyltransferase, alpha-ketoglutarate-dependent dioxygenase, dicamba monooxygenase, acetolactate synthase, cytochrome-like protein and/or protoporphyrinogen oxidase.

[0020] To achieve the above object, the present invention further provides a method for selecting transformed plant cells, comprising transforming a plurality of plant cells with the polynucleotide, and cultivating the cells under a concentration of the HPPD-inhibitor herbicide that allows the growth of the transformed cells expressing the polynucleotide, while killing the untransformed cells or inhibiting the growth of the untransformed cells.

[0021] Preferably, the plant comprises monocotyledonous plants and dicotyledonous plants; more preferably, the plant is oats, wheat, barley, millet, corn, sorghum, Brachypodiumdistachyon, rice, tobacco, sunflower, alfalfa, soybean, Cicerarietinum, peanuts, sugar beet, cucumber, cotton, oilseed rape, potato, tomato or Arabidopsisthaliana;

[0022] Preferably, the HPPD-inhibitor herbicide comprises an HPPD-inhibitor herbicide from the class of pyrazolinates, triketones and/or isoxazoles; more preferably, the HPPD-inhibitor herbicide of pyrazolinates is topramezone, the HPPD-inhibitor herbicide of triketones is mesotrione, and the HPPD-inhibitor herbicide of isoxazoles is isoxaflutole; particular preferably, the method for selecting transformed soybean plant cells comprises transforming a plurality of soybean plant cells with the polynucleotide, and cultivating the cells at a concentration of the HPPD-inhibitor herbicide that allows the growth of the transformed cells that express the polynucleotide, and kills the untransformed cells or inhibits the growth of untransformed cells, wherein the HPPD-inhibitor herbicide is topramezone, mesotrione, or isoxaflutole.

[0023] To achieve the above object, the present invention further provides a method for controlling weeds, comprising applying an effective dose of the HPPD-inhibitor herbicide to a field planting with a target plant, wherein the target plant contains the polynucleotide;

[0024] Preferably, the target plant comprises monocotyledonous plants and dicotyledonous plants; more preferably, the target plant is oats, wheat, barley, millet, corn, sorghum, Brachypodiumdistachyon, rice, tobacco, sunflower, alfalfa, soybean, Cicerarietinum, peanut, sugar beet, cucumber, cotton, oilseed rape, potato, tomato or Arabidopsisthaliana; further preferably, the target plant is glyphosate-tolerant plant, and the weeds are glyphosate-resistant weeds;

[0025] Preferably, the HPPD-inhibitor herbicide comprises an HPPD-inhibitor herbicide from the class of pyrazolinates, triketones and/or isoxazoles; more preferably, the HPPD-inhibitor herbicide of pyrazolinates is topramezone, the HPPD-inhibitor herbicide of triketones is mesotrione, and the HPPD-inhibitor herbicide of isoxazoles is isoxaflutole; particular preferably, the method for controlling weeds comprises applying an effective dose of the HPPD-inhibitor herbicide to a field in which a soybean plant is grown, wherein the soybean plant comprises the polynucleotide; wherein the HPPD-inhibitor herbicide is topramezone, mesotrione, or isoxaflutole.

[0026] To achieve the above object, the present invention further provides a method for protecting a plant from damages caused by an HPPD-inhibitor herbicide or for conferring tolerance to HPPD-inhibitor herbicide upon a plant, comprising introducing the polynucleotide or the expression cassette or the recombinant vector into the plant, resulting in an amount of the mutant hydroxyphenylpyruvate dioxygenase polypeptide that is sufficient to protect the plant into which the polynucleotide or the expression cassette or the recombinant vector has been introduced from damages caused by the HPPD-inhibitor herbicide.

[0027] Preferably, the plant comprises monocotyledonous plants and dicotyledonous plants; more preferably, the plant is oats, wheat, barley, millet, corn, sorghum, Brachypodiumdistachyon, rice, tobacco, sunflower, alfalfa, soybean, Cicerarietinum, peanut, sugar beet, cucumber, cotton, oilseed rape, potato, tomato or Arabidopsisthaliana;

[0028] Preferably, the HPPD-inhibitor herbicide comprises an HPPD-inhibitor herbicide from the class of pyrazolinates, triketones and/or isoxazoles; more preferably, the HPPD-inhibitor herbicide of pyrazolinates is topramezone, the HPPD-inhibitor herbicide of triketones is mesotrione, and the HPPD-inhibitor herbicide of isoxazoles is isoxaflutole; particular preferably, the method for protecting a soybean plant from damages caused by an HPPD-inhibitor herbicide or for conferring tolerance to the HPPD-inhibitor herbicide upon a soybean plant comprises introducing the polynucleotide or the expression cassette or the recombinant vector into the soybean plant, resulting in an amount of the mutant hydroxyphenylpyruvate dioxygenase polypeptides that is sufficient to protect the soybean plant into which the polynucleotide or the expression cassette or the recombinant vector has been introduced from the damage of the HPPD-inhibitor herbicide; wherein the HPPD-inhibitor herbicide is topramezone, mesotrione, or isoxaflutole.

[0029] To achieve the above object, the present invention further provides a method for generating a plant which is tolerant to an HPPD-inhibitor herbicide, comprising introducing the polynucleotide into the genome of the plant;

[0030] Preferably, the introducing method comprises genetic transformation, genome editing or gene mutation methods.

[0031] Preferably, the plant comprises monocotyledonous plants and dicotyledonous plants; more preferably, the plant is oats, wheat, barley, millet, corn, sorghum, Brachypodiumdistachyon, rice, tobacco, sunflower, alfalfa, soybean, Cicerarietinum, peanut, sugar beet, cucumber, cotton, oilseed rape, potato, tomato or Arabidopsisthaliana;

[0032] Preferably, the HPPD-inhibitor herbicide comprises an HPPD-inhibitor herbicide from the class of pyrazolinates, triketones and/or isoxazoles; more preferably, the HPPD-inhibitor herbicide of pyrazolinates is topramezone, the HPPD-inhibitor herbicide of triketones is mesotrione, and the HPPD-inhibitor herbicide of isoxazoles is isoxaflutole; particular preferably, the method for generating soybean plants that are tolerant to the HPPD-inhibitor herbicide comprises introducing the polynucleotide into the genome of the soybean plants; wherein the HPPD-inhibitor herbicide is topramezone, mesotrione, or isoxaflutole.

[0033] To achieve the above object, the present invention further provides a method for cultivating a plant which is tolerant to an HPPD-inhibitor herbicide, comprising:
[0034] planting at least one plant propagule, wherein the plant propagule comprises in its genome the polynucleotide;
[0035] allowing the plant propagule to grow into a plant; and
[0036] applying an effective dose of the HPPD-inhibitor herbicide to a plant growing environment comprising at least the plant, and harvesting the plant having a reduced plant damage and/or increased plant yield compared to other plants without the polynucleotide;

[0037] Preferably, the plant comprises monocotyledonous plants and dicotyledonous plants; more preferably, the plant is oats, wheat, barley, millet, corn, sorghum, Brachypodiumdistachyon, rice, tobacco, sunflower, alfalfa, soybean, Cicerarietinum, peanut, sugar beet, cucumber, cotton, oilseed rape, potato, tomato or Arabidopsisthaliana;

[0038] Preferably, the HPPD-inhibitor herbicide comprises an HPPD-inhibitor herbicide from the class of pyrazolinates, triketones and/or isoxazoles; more preferably, the HPPD-inhibitor herbicide of pyrazolinates is topramezone, the HPPD-inhibitor herbicide of triketones is mesotrione, and the HPPD-inhibitor herbicide of isoxazoles is isoxaflutole; particular preferably, the method for cultivating a soybean plant which is tolerant to the HPPD-inhibitor herbicide comprises planting at least one soybean plant seed, wherein the soybean plant seed comprises in its genome the polynucleotide; allowing the soybean plant seed to grow into a soybean plant; applying an effective dose of the HPPD-inhibitor herbicide to a plant growing environment comprising at least the soybean plant, and harvesting the soybean plant with reduced plant damage and/or increased plant yield compared to other soybean plants which do not comprise the polynucleotide; wherein the HPPD-inhibitor herbicide is topramezone, mesotrione, or isoxaflutole.

[0039] The present invention also provides a method for obtaining a processed agricultural product, comprising treating the harvested product obtained by the method from the plant which is tolerant to the HPPD-inhibitor herbicide to obtain the processed agricultural product.

[0040] To achieve the above object, the present invention further provides a planting system for controlling the growth of weeds, comprising an HPPD-inhibitor herbicide and a plant growing environment in which at least one target plant is present, wherein the target plant contains the polynucleotide;

[0041] Preferably, the target plant comprises monocotyledonous plants and dicotyledonous plants; more preferably, the target plant is oats, wheat, barley, millet, corn, sorghum, Brachypodiumdistachyon, rice, tobacco, sunflower, alfalfa, soybean, Cicerarietinum, peanut, sugar beet, cucumber, cotton, oilseed rape, potato, tomato or Arabidopsisthaliana; further preferably, the target plant is a glyphosate-tolerant plant, and the weeds are glyphosate-resistant weeds.

[0042] Preferably, the HPPD-inhibitor herbicide comprises an HPPD-inhibitor herbicide from the class of pyrazolinates, triketones and/or isoxazoles; more preferably, the HPPD-inhibitor herbicide of pyrazolinates is topramezone, the HPPD-inhibitor herbicide of triketones is mesotrione, and the HPPD-inhibitor herbicide of isoxazoles is isoxaflutole; particular preferably, the planting system for controlling the growth of weeds comprises an HPPD-inhibitor herbicide and a plant growing environment in which at least one soybean plant is present, wherein the soybean plant contains the polynucleotide, and the HPPD-inhibitor herbicide is topramezone, mesotrione, or isoxaflutole.

[0043] To achieve the above object, the present invention further provides use of the mutant hydroxyphenylpyruvate dioxygenase polypeptide for conferring tolerance to an HPPD-inhibitor herbicide upon a plant;

[0044] Preferably, the plant comprises monocotyledonous plants and dicotyledonous plants; more preferably, the plant is oats, wheat, barley, millet, corn, sorghum, Brachypodiumdistachyon, rice, tobacco, sunflower, alfalfa, soybean, Cicerarietinum, peanut, sugar beet, cucumber, cotton, oilseed rape, potato, tomato or Arabidopsisthaliana;

[0045] Preferably, the HPPD-inhibitor herbicide comprises an HPPD-inhibitor herbicide from the class of pyrazolinates, triketones and/or isoxazoles; more preferably, the HPPD-inhibitor herbicide of pyrazolinates is topramezone, the HPPD-inhibitor herbicide of triketones is mesotrione, and the HPPD-inhibitor herbicide of isoxazoles is isoxaflutole; particular preferably, use of the mutant hydroxyphenylpyruvate dioxygenase polypeptide for conferring tolerance to an HPPD-inhibitor herbicide upon a soybean plant, wherein the HPPD-inhibitor herbicide is topramezone, mesotrione, or isoxaflutole.

[0046] The article “a” and “an” as used herein refers to one or more than one (i.e., to at least one). For example, “an element” means one or more elements (components). Furthermore, the term “comprise” or variants thereof such as “comprises” or “comprising” should be understood to imply the inclusion of a stated element, integer or step, or group of elements, integers or steps, but not the exclusion of any other element, integer or step, or group of elements, integers or steps.

[0047] Within the context of the present invention, the terms “hydroxy phenyl pyruvate dioxygenase (HPPD)”, “4-hydroxy phenyl pyruvate dioxygenase (4-HPPD)” and “p-hydroxy phenyl pyruvate dioxygenase (p-HPPD)” are synonymous.

[0048] The term “HPPD-inhibitor herbicide” refers to herbicides that act either directly or indirectly to inhibit HPPD, where the herbicides are bleachers. Most commercially available HPPD-inhibitor herbicides belong to one of the three chemical families as listed below: (1) Triketones, e.g. sulcotrione (i.e. 2-[2-chloro-4-(methylsulfonyl)benzoyl]-1,3-cyclohexane- -dione), mesotrione (i.e. 2-[4-(methylsulfonyl)-2-nitrobenzoyl]-1,3-cyclohexanedione); tembotrione (i.e. 2-[2-chloro-4-(methylsulfony1)-3-[(2,2,2-trifluoroethoxy)methyl]benzoyl]- -1,3-cyclohexanedione); (2) Isoxazoles, e.g. isoxaflutole (i.e. (5-cyclopropyl-4-isoxazolyl)[2- -(methylsulfonyl)-4-(trifluoromethyl)phenyl]methanone); (3) Pyrazolinates, e.g. topramezone (i.e., [3-(4,5-dihydro-3-isoxazolyl)-2-methyl-4-(methylsulfonyl)phenyl] (5-hydroxy-1-methyl- -pyrazol-4-yl)methanone), pyrasulfotole (i.e., (5-hydroxy-1,3-dimethylpyrazol-4-yl)(2-methyl- -sulfonyl-4-(trifluoromethylphenyl)methanone).

[0049] As used herein, topramezone (also known as BAS-670H) refers to [3-(4,5-dihydro-3-isoxazolyl) -2-methyl-4-(methylsulfonyl)phenyl] (5-hydroxy-1-methy-1-pyrazol-4-yl)methanone as a white crystalline solid. It is a systemic conduction-type HPPD-inhibitor herbicide of pyrazolinates for the post-emergence treatment of stems and leaves in a typical dosage form of 30% suspension concentrate. Commercial formulations of topramezone (such as Topramezone SC) can be used for the control of gramineous and broad-leaf weeds, at 5.6-6.7 g per acre. The weeds that can be effectively controlled include but are not limited to, Digitariasanguinalis ( Calathodes oxycarpa), Barnyard grass, EleusineindicaGaertn, Eriochloavillosa, Setariaviridis (Giant foxtail), Chenopodiumalbum, Polygonaceae, Abutilonavicennae, Abutilontheophrasti, Pigweeds, Portulacaoleracea, Xanthium strumarium, and Solanumnigrum. Topramezone SC combined with Atrazine can result in a significantly enhanced effect. Apart from the excellent efficacy on the aforementioned weeds, topramezone can also have good controlling effects on malignant broad-leaf weeds, such as CephalanoplossegetumKitam ( Cirsiumsegestum), Sonchusarvensis, Acalyphaaustralis, and Commelinacommunis (Asiatic dayflower), and in particular it can effectively control Setariaviridis, Digitariasanguinalis, EleusineindicaGaertn, and Eriochloavillosa which are difficult to be controlled by mesotrione.

[0050] As used herein, the “effective dose” of topramezone means being used at an amount ranging from 25 to 100 g ai/ha, including from 30 to 95 g ai/ha, from 40 to 90 g ai/ha, from 50 to 85 g ai/ha or from 60 to 80 g ai/ha.

[0051] As used herein, the “mesotrione” refers to 2-[4-(methylsulfonyl)-2-nitrobenzoyl]-1,3- -cyclohexanedione as a brown or light yellow solid. It is a selective systemic conduction-type HPPD-inhibitor herbicide of triketones that provides both pre- and post-emergence weed control in plants. It can be absorbed by plants through the leaves and roots, and be translocated downward from top to bottom parts, resulting in chlorosis (yellowing) symptom of the meristems followed by necrosis (dead tissue) 3 to 5 days after herbicide application, and further death of the entire plants. Mesotrione is useful for pre- and post-emergence control of annual broad-leaf weeds and gramineous weeds in plants; wherein the annual broad-leaf weeds that can be controlled mainly comprise Xanthium strumarium, Abutilontheophrasti, Chenopodiumalbum, amaranth, Polygonaceae, Solanumnigrum, and Ambrosiatrifida; and the gramineous weeds that can be controlled mainly comprise young barnyard grass, Digitariasanguinalis, Setariaviridis, and Brachiariadecumbens.

[0052] As used herein, the “effective dose” of mesotrione means being used at an amount ranging from 70 to 420 g ai/ha, including from 75 to 150 g ai/ha, from 105 to 210 g ai/ha, from 150 to 225 g ai/ha or from 210 to 315 g ai/ha.

[0053] As used herein, isoxaflutole refers to 5-cyclopropyl-4-isoxazolyl)[2-(methylsulfonyl)-4- -(trifluoromethyl)phenyl]methanone as a white to pale-yellow solid. It is a selective systemic pre-emergence HPPD-inhibitor herbicide of organic heterocyclic isoxazoles and predominantly works by absorption and translocation via the young weed roots. Isoxaflutole is mainly useful for controlling various annual broad-leaf weeds, such as Abutilontheophrasti, Chenopodiumalbum, Kochiascoparia, Salsolaarbuscula, Solanumnigrum, Amaranthus retroflexus, Polygonumbungeanum, Bidenspilosa, Portulacaoleracea, Chickweed, Elsholtzia, Xanthium strumarium, Acalyphaaustralis, Amethysteacaerulea, PolygonumLapathifolium, and Veronicapolita, in fields of dryland crops, and also has good controlling efficacy on some annually gramineous weeds, such as Digitariasanguinalis, Barnyard grass, EleusineindicaGaertn, Leptochloachinensis, Setariafaberi, and Setariaviridis.

[0054] As used herein, the “effective dose” of isoxaflutole means being used at an amount ranging from 67 to 280 g ai/ha, including from 70 to 134 g ai/ha, from 70 to 140 g ai/ha, from 134 to 201 g ai/ha or from 140 to 210 g ai/ha.

[0055] As used herein, the term “resistance” is inheritable and allows a plant to grow and propagate under the circumstance where an effective treatment with an ordinary herbicide is performed on a given plant. As recognized by a person skilled in the art, even if there is certain degree of damage (such as small necrosis, dissolution, chlorosis or other damage) to the given plant treated with the herbicide, at least the yield is not significantly compromised and thus the plant can still be considered as “resistant”. In other words, the given plant has increased ability to resist various degrees of damage induced by the herbicide, and in general, damage to a wild-type plant with the same genotype can be caused at the same dose of the herbicide. The term “tolerant” or “tolerance” in the present invention is more extensive than the term “resistance” and includes “resistance”.

[0056] As used herein, the term “confer” refers to providing a characteristic or trait, such as herbicide tolerance and/or other desirable traits to a plant.

[0057] As used herein, the term “heterologous” means from another source. In the context of DNA, “heterologous” refers to any foreign “non-self” DNA including that from another plant of the same species. For example, in the present invention a soybean HPPD gene that can be expressed in a soybean plant by means of transgenic methods would still be considered as “heterologous” DNA.

[0058] As used herein, the term “nucleic acid” includes a deoxyribonucleotide or ribonucleotide polymer in either single- or double-stranded forms, and unless otherwise specified, encompasses known analogues (e.g., peptide nucleic acids) having the essential properties of natural nucleotides in that they hybridize to single-stranded nucleic acids in a manner similar to naturally occurring nucleotides.

[0059] As used herein, the term “encoding” or “encoded” when used in the context of a specified nucleic acid means that the nucleic acid comprises the requisite information to direct translation of the nucleotide sequence into a specified protein. The information by which a protein is encoded is specified by the use of codons. A nucleic acid encoding a protein may comprise non-translated sequences (e.g., introns) within translated regions of the nucleic acid or may lack such intervening non-translated sequences (e.g., as in cDNA).

[0060] The proteins of the invention may be altered in various ways including amino acid substitutions, deletions, truncations, and insertions. For example, amino acid sequence variants and fragments of the mutant HPPD proteins can be prepared by mutations in the DNA. Methods for the induction of polynucleotide mutations are well-known in the art. See, for example, Kunkel (1985) Proc. Natl. Acad. Sci. USA 82:488-492; Kunkel et al. (1987) Methods in Enzymol. 154:367-382; U.S. Pat. No. 4,873,192; Walker and Gaastra, eds. (1983) Techniques in Molecular Biology (MacMillan Publishing Company, New York) and the references cited therein. Guidance as to appropriate amino acid substitutions that often do not affect biological activity of the protein of interest may be found in the model of Dayhoff et al. (1978) Atlas of Protein Sequence and Structure (Natl. Biomed. Res. Found., Washington, D.C.). Conservative substitutions, such as exchanging one amino acid with another having similar properties, may be optimal.

[0061] As described herein, the mutant HPPD polypeptides or variants and fragments thereof possess HPPD enzymatic activity and confer tolerance to certain classes of HPPD-inhibitor herbicides upon plants. The mutant HPPD polypeptides have amino acid changes at one or more positions relative to the starting wild-type sequence from which they are derived, and exhibit enhanced tolerance to one or more HPPD-inhibitor herbicides. HPPD enzymes that exhibit enhanced tolerance to at least one HPPD-inhibitor herbicide may do so by virtue of exhibiting, relative to the like unmutated starting enzyme.

[0062] DNA sequences encoding such mutant HPPD polypeptides are used in the provision of plants, plant cells and seeds of the present invention that offer enhanced tolerance to one or more HPPD-inhibitor herbicides compared with like plants likewise expressing the unmutated starting enzyme.

[0063] Plant HPPD genes encoding such mutant HPPD polypeptides are useful for generating plants tolerant to HPPD-inhibitor herbicides. Plant HPPD genes so modified are particularly suitable for expression in plants to confer herbicide tolerance upon plants.

[0064] Many HPPD sequences are known in the art and can be used to generate mutant HPPD sequences by making substitutions, deletions, and/or additions in the corresponding amino acids. The position 372 of the present invention is calculated using the position of the amino acid at position 372 of the Avena native HPPD amino acid sequence set forth in SEQ ID NO:1 as the standard. The mutant HPPD polypeptide according to the present invention comprises a mutation occurring at an amino acid (phenylalanine) corresponding to position 372 of SEQ ID NO:1, with the mutated forms being F372A, F372G, F372V, F372P, F372S, F372T, F372C, F372M, F372Q, F372D, or F372 deletion; preferably F372A, F372G, and F372V; and more preferably, F372A. Thus, a known or suspected HPPD sequence can be aligned with the amino acid sequence as set forth in SEQ ID NO:1 using standard sequence alignment tools, and the substitutions or deletions in the corresponding amino acids with respect to the amino acid sequence as set forth in SEQ ID NO: 1 as described herein can be made in the known or suspected HPPD sequence.

[0065] The present invention comprise a mutant HPPD polypeptide which is derived from HPPDs in plants or microorganisms, has HPPD enzymatic activity, and comprises at least one mutation at position 372 of the amino acid sequence as set forth in SEQ ID NO:1, optionally further in combination with a mutation at other known positions (the corresponding positions present in the HPPD polypeptide), for example, in combination with one or more mutations at the following corresponding positions: P215, G298, G332, F333, G334, G336, and N337 in the amino acid sequence of the HPPD from Pseudomonasfluorescens, and/or V217, A326, L358, and G408 in the amino acid sequence of the HPPD from Avena; preferably, the G336 comprises a mutated form of: G336W, G336H, G336M, G336F or G336C; the V217 mutation comprises a mutated form of V217I; the A326 mutation comprises a mutated form of A326R; the L358 mutation comprises a mutated form of L358M; and the G408 mutation comprises a mutated form of G408A. In the various embodiments described above, the mutated form at position 372 may be F372A, F372G, F372V, F372P, F372S, F372T, F372C, F372M, F372Q, F372D, or F372 deletion; preferably, the mutated form is F372A, F372G and F372V; and more preferably, the mutated form is F372A.

[0066] Further, the present invention comprise a mutant HPPD polypeptide which is derived from HPPDs (by substitutions, deletions and/or additions) in plants or microorganisms of different species or different ecotypes within the same species. In addition to the HPPDs from the ecotypes within the species as listed in the examples of the present invention, exemplary HPPDs from different ecotypes within the same species further include, but are not limited to, HPPDs from the ecotypes within the following species: HPPDs from the different ecotypes of cotton with the Accession Number: A0A0D2PWQ6, A0A2P5SI66, A0A0D2LWN1 or A0A0D2N7F6; HPPDs from Brachypodiumdistachyon with the Accession Number: I1IJR8; HPPDs from different ecotypes of barley with the Accession Number: BAJ86732.1, BAJ95714.1 or F2E412; HPPDs from different ecotypes of millets with the Accession Number: XP_012704274.1 or RCV05326.1; HPPDs from different ecotypes of rice with the Accession Number: A3A3J1, B8AIH6 or A0A0E0G1W2; HPPDs from different ecotypes of soybean with the Accession Number: A5Z1N7, I1M6Z4, A0A088MGH9 or I1M6Z5; HPPDs from different ecotypes of oilseed rape with the Accession Number: VDC64417.1, CDY10210.1, AFB74208.1, XP_013595640.1, XP_013695641.1, RID40406.1, RID48932.1, XP_009118533.1, XP_009119049.1, XP_013723237.1,AFB74218,1 or AFB74207.1; HPPDs from sunflower with the Accession Number: A0A251V125; HPPDs from different ecotypes of alfalfa with the Accession Number: XP_003617391.2, AAX59006.1, XP_003617384.1, XP_013466115.1, AET00342.2 or A0A396HWH5; HPPDs from sugar beet with the Accession Number: LOG104902719; HPPDs from different ecotypes of tobacco with the Accession Number: XP_009770088.1 or XP_009587203.1; HPPDs from potato with the Accession Number: LOC102595018; HPPDs from different ecotypes of tomato with the Accession Number: XP_004240171.1, NP_001310368.1, XP_015082678.1 or ADZ24700.1; and HPPDs from peanut with the Accession Number: XP_025608715.1 (these Accession Numbers are available at GenBank Database or UniProt Knowledgebase Database).

[0067] In one embodiment, the present invention comprise a mutant HPPD polypeptide which is derived from the amino acid sequence of the HPPD from Avena as set forth in SEQ ID NO:1 or has at least about 80%, 85%, 90%, 91%, 92%, 93%, 94%, 95%, 96%, 97%, 98%, 99% or more sequence identity to SEQ ID NO:1, possesses HPPD enzymatic activity, and comprises at least one mutation at position 372 of the amino acid sequence as set forth in SEQ ID NO:1, optionally further in combination with other known mutations. In different embodiments, the polypeptide may comprise at a position corresponding to position 372 of the amino acid sequence as set forth in SEQ ID NO:1 the following mutations: F372A, F372G, F372V, F372P, F372S, F372T, F372L, F372I, F372W, F372C, F372N, F372E, F372M, F372Q, F372D, F372K or F372 deletion; preferably, the mutated form is F372A, F372G and F372V; and more preferably, the mutated form is F372A.

[0068] In another embodiment, the present invention comprises a mutant HPPD polypeptide which is derived from the amino acid sequence of the HPPD from Pseudomonasfluorescens as set forth in SEQ ID NO:27 or has at least about 80%, 85%, 90%, 91%, 92%, 93%, 94%, 95%, 96%, 97%, 98%, 99% or more sequence identity to SEQ ID NO:27, possesses HPPD enzymatic activity, and comprises at least one mutation at a position corresponding to position 372 of the amino acid sequence as set forth in SEQ ID NO:1, optionally further in combination with other known mutations. In different embodiments, the polypeptide may comprise at a position corresponding to position 372 of the amino acid sequence as set forth in SEQ ID NO:1 the following mutations: F372A, F372G, F372V, F372P, F372S, F372T, F372C, F372M, F372Q, F372D, or F372 deletion; preferably, the mutated form is F372A, F372G and F372V; and more preferably, the mutated form is F372A.

[0069] The term “position 372” or “372 position” not only in a narrow sense refers to the amino acid (phenylalanine) at position 372 of the amino acid sequence as set forth in SEQ ID NO: 1, but also in a broad sense comprises a position corresponding to the amino acid at position 372 of the amino acid sequence as set forth in SEQ ID NO:1 obtained in a known or suspected HPPD amino acid sequence which can be aligned with the amino acid sequence as set forth in SEQ ID NO:1 using standard sequence alignment tools (such as CLUSTAL software), which might not be the position 372 of the amino acid sequence of that HPPD.

[0070] The term “corresponding to” refers to a position corresponding to an amino acid at a particular position of the amino acid sequence as set forth in SEQ ID NO:1 obtained by aligning an HPPD amino acid sequence which is derived from a different species or different ecotype within the same species, with the amino acid sequence as set forth in SEQ ID NO:1 using standard sequence alignment tools, such as a position corresponding to the amino acid at position 372 of the amino acid sequence as set forth in SEQ ID NO:1.

[0071] The terms “polypeptide”, “peptide”, and “protein” are used interchangeably herein and refer to a polymer of amino acid residues. The terms apply to amino acid polymers in which one or more amino acid residues are an artificial chemical analogue of a corresponding naturally occurring amino acid, as well as to naturally occurring amino acid polymers. Polypeptides of the invention can be produced either from a nucleic acid disclosed herein, or by means of standard molecular biology techniques. For example, a truncated protein of the invention can be produced by expression of a recombinant nucleic acid of the invention in an appropriate host cell, or alternatively by a combination of ex vivo procedures, such as protease digestion and purification.

[0072] Accordingly, the present invention also provides nucleic acid molecules comprising polynucleotide sequences that encode mutant HPPD polypeptides that have enzymatic activity of HPPD and that confer tolerance in plants to certain classes of herbicides that inhibit HPPD, and variants and fragments thereof. In general, the invention includes any polynucleotide sequence that encodes any of the mutant HPPD polypeptides described herein, as well as any polynucleotide sequence that encodes HPPD polypeptides having one or more conservative amino acid substitutions relative to the mutant HHPD polypeptides described herein. Conservative substitutions providing functionally similar amino acids are well-known in the art. The following five groups each contain amino acids that are conservative substitutions for one another: Aliphatic: Glycine (G), Alanine (A), Valine (V), Leucine (L), Isoleucine (I); Aromatic: Phenylalanine (F), Tyrosine (Y), Tryptophan (W); Sulfur-containing: Methionine (M), Cysteine (C); Basic: Arginine (I), Lysine (K), Histidine (H); Acidic: Aspartic acid (D), Glutamic acid (E), Asparagine (N), Glutamine (Q).

[0073] In one embodiment, the present invention provides a polynucleotide sequence encoding an amino acid sequence derived from HPPDs in plants or microorganisms, where the polypeptide has HPPD enzymatic activity and comprises at least one mutation at a position corresponding to the amino acid at position 372 of SEQ ID NO:1.

[0074] Accordingly, sequences which have tolerance activity to HPPD-inhibitor herbicides and hybridize to genes encoding the mutant HPPD polypeptides of the invention are included within the present invention. Exemplary sequences comprise at least about 75%, 80%, 85%, 90%, 91%, 92%, 93%, 94%, 95%, 96%, 97%, 98%, 99% or more sequence identity to SEQ ID NO:5, SEQ ID NO:21, SEQ ID NO:26, SEQ ID NO:31, SEQ ID NO:37, SEQ ID NO:43, SEQ ID NO:49, SEQ ID NO:55, SEQ ID NO:61, SEQ ID NO:67, SEQ ID NO:73, SEQ ID NO:79, SEQ ID NO:85, SEQ ID NO:91, SEQ ID NO:97, SEQ ID NO:103, SEQ ID NO:109, SEQ ID NO:115, SEQ ID NO:121, SEQ ID NO:127, SEQ ID NO:133, SEQ ID NO:139, SEQ ID NO:145, SEQ ID NO:151, SEQ ID NO:157, SEQ ID NO:163, SEQ ID NO:169, and SEQ ID NO:175 of the invention.

[0075] Any conventional nucleic acid hybridization or amplification method can be used to identify the presence of the mutant HPPD gene of the present invention. A nucleic acid molecule or a fragment thereof is capable of specifically hybridizing to other nucleic acid molecules under certain circumstances. In the present invention, if two nucleic acid molecules can form an antiparallel double-stranded nucleic acid structure, then it can be considered that these two nucleic acid molecules can be specifically hybridized to each other. If two nucleic acid molecules exhibit a complete complementarity, then one nucleic acid molecule of the two is said to be the “complement” of the other nucleic acid molecule. In the present invention, when each nucleotide of a nucleic acid molecule is complementary to the corresponding nucleotide of another nucleic acid molecule, then these two nucleic acid molecules are said to exhibit a “complete complementarity”. If two nucleic acid molecules can be hybridized to each other with a sufficient stability to allow them to anneal and bind with each other at least under conventional “low stringency” conditions, then these two nucleic acid molecules are said to be “minimally complementary”. Similarly, if two nucleic acid molecules can be hybridized to each other with a sufficient stability to allow them to anneal and bind with each other under conventional “high stringency” conditions, then these two nucleic acid molecules are said to be “complementary”. Deviation from a complete complementarity is permissible, as long as this deviation does not completely prevent two molecules from forming a double-stranded structure. In order to enable a nucleic acid molecule to act as a primer or probe, it is only guaranteed that the molecule has a sufficient complementarity in its sequence to allow a stable double-stranded structure to be formed under the conditions of particular solvent and salt concentration.

[0076] In the present invention, a substantially homologous sequence is a nucleic acid molecule that can be specifically hybridized to the complementary strand of a matched nucleic acid molecule under high stringency conditions. Suitable stringent conditions that promote DNA hybridization are well-known to a person skilled in the art; for example, the suitable stringent conditions can be achieved by treating with 6.0× sodium chloride/sodium citrate (SSC) under conditions of approximately 45° C., and then washing with 2.0×SSC under conditions of 50° C. For example, the salt concentration in the washing step can be selected from the low stringency condition of about 2.0×SSC and 50° C. to the high stringency condition of about 0.2×SSC and 50° C. In addition, the temperature condition in the washing step can rise from the low stringency condition of room temperature (about 22° C.) to the high stringency condition of about 65° C. The temperature condition and the salt concentration can both vary, and it is also possible that one of the two remains unchanged, while the other varies. Preferably, the stringent conditions in the present invention can be achieved by specifically hybridizing to the mutant HPPD gene of the present invention in a 6×SSC, 0.5% SDS solution at 65° C., and then washing the membrane each once with 2×SSC, 0.1% SDS and 1×SSC, 0.1% SDS.

[0077] As used herein, the term “hybridizing” or “hybridizing specifically” refers to the binding, duplexing, or hybridizing of a molecule only to a particular nucleotide sequence under stringent conditions when that sequence is present in a complex mixture (e.g., total cellular) DNA or RNA.

[0078] Because of the degeneracy of the genetic codon, a variety of different DNA sequences may encode the same amino acid sequence. It is within the skill of a person skilled in the art to produce these alternative DNA sequences encoding the same or substantially the same protein. These different DNA sequences are included in the scope of the present invention. The “substantially the same” sequence refers to a sequence with an amino acid substitution, deletion, addition or insertion that does not substantively affect the herbicide tolerance activity, and includes a fragment retaining the herbicide tolerance activity.

[0079] The term “functional activity” or “activity” in the present invention means that the protein/enzyme used in the present invention (alone or in combination with other proteins) has the ability to degrade an herbicide or diminish the herbicide activity. A plant producing the protein of the present invention preferably produces an “effective amount” of the protein, so that when treating the plant with an herbicide, the protein expression level is sufficient to confer the plant a complete or partial tolerance to the herbicide (unless otherwise specified, in a general amount). The herbicide can be used in an amount which would usually kill a target plant or in a normal field amount and concentration. Preferably, the plant cell and plant of the present invention are protected from growth suppression or damage caused by treatment with the herbicide. The transformed plant and plant cell of the present invention are preferably tolerant to HPPD-inhibitor herbicides, that is, the transformed plant and plant cell can grow in the presence of an effective dose of HPPD-inhibitor herbicides.

[0080] The gene and protein in the present invention not only comprise a specific exemplary sequence, but also comprise a portion and/or a fragment (including an internal deletion and/or terminal deletion compared to the full-length protein), a variant, a mutant, a variant protein, a substitute (a protein having substituted amino acids), a chimera and a fusion protein which retain the HPPD-inhibitor herbicide tolerance activity characteristic of the specific exemplary protein.

[0081] The term “variant” in the present invention is intended to mean substantially similar sequences. For polynucleotides, a variant comprises a deletion and/or addition of one or more nucleotides at one or more internal sites within the reference polynucleotide and/or a substitution of one or more nucleotides at one or more sites in the mutant HPPD polynucleotide. As used herein, the term “reference polynucleotide or polypeptide” comprises a mutant HPPD nucleotide sequence or amino acid sequence, respectively. As used herein, the term “native polynucleotide or polypeptide” comprises a naturally occurring nucleotide sequence or amino acid sequence, respectively. For polynucleotides, conservative variants include those sequences that, because of the degeneracy of the genetic code, encode the amino acid sequence of one of the mutant HPPD polypeptides of the invention. Naturally occurring allelic variants such as these can be identified with the use of well-known molecular biology techniques, for example, with polymerase chain reaction (PCR) and hybridization techniques as outlined below. Variant polynucleotides also include synthetically derived polynucleotide, such as those generated, for example, by using site-directed mutagenesis but which still encode a mutant HPPD protein of the invention. Generally, variants of a particular polynucleotide of the invention will have at least about 75%, 80%, 85%, 90%, 91%, 92%, 93%, 94%, 95%, 96%, 97%, 98%, 99% or more sequence identity to that particular polynucleotide as determined by sequence alignment programs and parameters.

[0082] “Variant protein” in the present invention is intended to mean a protein derived from the reference protein by deletion or addition of one or more amino acids at one or more internal sites in the mutant HPPD protein and/or substitution of one or more amino acids at one or more sites in the mutant HPPD protein. Variant proteins encompassed by the present invention are biologically active, that is they continue to possess the desired biological activity of the mutant HPPD protein, that is, HPPD enzymatic activity and/or herbicide tolerance as described herein. Such variants may result from, for example, genetic polymorphism or from human manipulation. Biologically active variants of a mutant HPPD protein of the invention will have at least about 85%, 90%, 91%, 92%, 93%, 94%, 95%, 96%, 97%, 98%, 99% or more sequence identity across the entirety of the amino acid sequence for the mutant HPPD protein as determined by sequence alignment programs and parameters. A biologically active variant of a protein of the invention may differ from that protein by as few as 1-15 amino acid residues, as few as 1-10, such as 6-10, as few as 5, as few as 4, 3, 2, or even 1, amino acid residue.

[0083] Methods of alignment of sequences are well-known in the art and can be accomplished using mathematical algorithms such as the algorithm of Myers and Miller (1988) CABIOS 4:11-17; the local alignment algorithm of Smith et al. (1981)Adv. Appl. Math. 2:482; the global alignment algorithm of Needleman and Wunsch (1970) J. Mol. Biol. 48:443-453; and the algorithm of Karlin and Altschul (1990) Proc. Natl. Acad. Sci. USA 872264, modified as in Karlin and Altschul (1993) Proc. Natl. Acad. Sci. USA 90:5873-5877. Computer implementations of these mathematical algorithms can be utilized for comparison of sequences to determine sequence identity. Such implementations include, but are not limited to: CLUSTAL in the PC/Gene program (available from Intelligenetics, Mountain View, California); the ALIGN program (Version 2.0) and GAP, BESTFIT, BLAST, FASTA, and TFASTA in the GCG Wisconsin Genetics Software Package, Version 10 (available from Accelrys Inc., 9685 Scranton Road, San Diego, California, USA).

[0084] In certain examples, the amino acids encoding mutant HPPD polypeptides or variants thereof that retain HPPD enzymatic activity can be stacked with any combination of polynucleotide sequences of interest in order to create plants with a desired trait. The term “trait” refers to the phenotype derived from a particular sequence or groups of sequences. For example, the amino acids/polynucleotides encoding a mutant HPPD polypeptide or variant thereof that retains HPPD enzymatic activity may be stacked with any other polynucleotides encoding polypeptides that confer a desirable trait, including but not limited to resistance to diseases, insects, and herbicides, tolerance to heat and drought, reduced time to crop maturity, improved industrial processing, such as for the conversion of starch or biomass to fermentable sugars, and improved agronomic quality, such as high oil content and high protein content.

[0085] It is well-known for a person skilled in the art that the benefits of a combination of two or more modes of action in improving the spectrum of weeds controlled and/or the control of naturally more tolerant species or resistant weed species, can also be extended to chemicals for which herbicide tolerance was enabled in crops through artificial methods (either transgenically or non-transgenically) beyond HPPD tolerant crops. In fact, the traits encoding the following resistances can be superposed alone or in multiple combinations to provide the ability to effectively control or prevent weed shifts to herbicides: glyphosate resistance (such as EPSPS, GOX, and GAT from resistant plants or bacteria), glufosinate resistance (such as PAT and Bar), herbicide resistance to acetolactate synthase (ALS) inhibitors (such as imidazolinones, sulfonyl urea, triazole pyrimidines, sunonaica aniline, pyrnniumyl thiobenzoic acids and other chemials resistant genes, e.g., AHAS, Csrl, and SurA), phenoxyauxin herbicide resistance (such as aryloxyalkanoate dioxygenase-12 (AAD-12)), dicamba herbicide resistance (such as dicamba monooxygenase (DMO)), bromoxynil resistance (such as Bxn), phytoene desaturase (PDS) inhibitor resistance, herbicide resistance to photosystem II inhibitors (such as psbA), herbicide resistance to photosystem I inhibitors, herbicide resistance to protoporphyrinogen oxidase IX (PPO) inhibitors (such as PPO-1), phenylurea herbicide resistance (such as CYP76B1), and dichloromethoxybenzoic acid degrading enzymes.

[0086] Glyphosate is widely used, as it controls a very broad spectrum of broad-leaf and gramineous weed species. However, repeat use of glyphosate in glyphosate-tolerant crop and non-crop applications has (and will continue to) selected for weed shifts to naturally more tolerant species or glyphosate resistant biotypes. Most herbicide resistance management programs suggest using an effective dose of tank-mixed herbicide partners as a means for delaying the emergence of resistant weeds, wherein the herbicide partners provide control for the same species, but have different modes of action. Superposing the gene encoding the mutant HPPD polypeptide of the present invention with a glyphosate tolerance trait (and/or other herbicide tolerance traits) can achieve the control of glyphosate resistant weed species (broad-leaf weed species controlled by one or more HPPD-inhibitor herbicides) in glyphosate tolerant crops by enabling the selective use of glyphosate and HPPD-inhibitor herbicides (such as topramezone, mesotrione, or isoxaflutole) in the same crop. The applications of these herbicides can be performed simultaneously in a tank mixture containing two or more herbicides with different modes of action, or can be performed alone in a single herbicide composition in sequential applications (e.g., before planting, or before or after emergence) (with the interval time of applications ranging from 2 hours to 3 months); or alternatively, the applications of these herbicides can be performed by using a combination of any number of herbicides representative of each applicable compound category at any time (from 7 months after planting a crop to the time when the crop is harvested (or the pre-harvest interval for a single herbicide, wherein the shortest is taken)).

[0087] The flexibility in controlling broad-leaf weeds is very important, in terms of the application time, application amount of single herbicide, and abilities to control the stubborn or resistant weeds. The application range of glyphosate superposed with a glyphosate resistant gene/mutant HPPD gene in crops can be from 250 to 2500 g ae/ha. The application range of HPPD-inhibitor herbicides (one or more) can be from 25 to 500 g ai/ha. The optimal combination of time for these applications depends on the specific conditions, species and environments.

[0088] An herbicide formulation (e.g., an ester, acid or salt-formulation, or soluble concentrate, emulsifiable concentrate or soluble liquid) and a tank mix additive (e.g., an adjuvant or compatilizer) can significantly affect the weed control of a given herbicide or a combination of one or more herbicides. Any chemical combination of any of the foregoing herbicides is within the scope of the present invention.

[0089] In addition, the gene encoding the mutant HPPD polypeptide of the present invention alone or being stacked with other characteristics of herbicide resistant crops can be stacked with one or more other input traits (for example, insect resistance, fungal resistance or stress tolerance, etc.) 16 or output traits (for example, increased yield, improved oil amount, increased fiber quality, etc.). Therefore, the present invention can be used to provide complete agricultural solutions for improving the qualities of crops with the abilities for flexibly and economically controlling any number of agriculture pests.

[0090] These stacked combinations can be created by any method including, but not limited to, cross-breeding plants by any conventional or TopCross methodology, or genetic transformation. If the sequences are stacked by genetically transforming the plants, the polynucleotide sequences of interest can be combined at any time and in any order. For example, a transgenic plant comprising one or more desired traits can be used as the target to introduce further traits by subsequent transformation. The traits can be introduced simultaneously in a co-transformation protocol with the polynucleotides of interest provided by any combination of transformation cassettes. For example, if two sequences will be introduced, the two sequences can be contained in separate transformation cassettes (trans) or contained on the same transformation cassette (cis). Expression of the sequences can be driven by the same promoter or by different promoters. In certain cases, it may be desirable to introduce a transformation cassette that will suppress the expression of the polynucleotide of interest. This may be combined with any combination of other suppression cassettes or overexpression cassettes to generate the desired combination of traits in the plant. It is further recognized that polynucleotide sequences can be stacked at a desired genomic location using a site-specific recombination system.

[0091] The gene encoding the mutant HPPD polypeptide according to the present invention has higher tolerance to HPPD-inhibitor herbicides, which is an important basis for herbicide tolerant crops and selectable marker trait opportunities.

[0092] The term “expression cassette” as used herein means a nucleic acid molecule capable of directing expression of a particular nucleotide sequence in an appropriate host cell, comprising a promoter effectively linked to the nucleotide sequence of interest (i.e., a polynucleotide encoding a mutant HPPD polypeptide or variant thereof that retains HPPD enzymatic activity, alone or in combination with one or more additional nucleic acid molecules encoding polypeptides that confer desirable traits) which is effectively linked to termination signals. The coding region usually codes for a protein of interest but may also code for a functional RNA of interest, for example antisense RNA or a non-translated RNA, in the sense or antisense direction. The expression cassette comprising the nucleotide sequence of interest may be chimeric, meaning that at least one of its components is heterologous with respect to at least one of its other components. The expression cassette may also be one that is naturally occurring but has been obtained in a recombinant form useful for heterologous expression. Typically, however, the expression cassette is heterologous with respect to the host, i.e., the particular DNA sequence of the expression cassette does not occur naturally in the host cell and must have been introduced into new host cell by a transformation event. The expression of the nucleotide sequence in the expression cassette may be under the control of a constitutive promoter or of an inducible promoter that initiates transcription only when the host cell is exposed to some particular external stimulus. Additionally, the promoter can also be specific to a particular tissue or organ or stage of development.

[0093] The present invention encompasses the transformation of plants with expression cassettes capable of expressing a polynucleotide of interest (i.e., a polynucleotide encoding a mutant HPPD polypeptide or variant thereof that retains HPPD enzymatic activity, alone or in combination with one or more additional nucleic acid molecules encoding polypeptides that confer desirable traits). The expression cassette will include in the 5′-3′ direction of transcription, a transcriptional and translational initiation region (i.e., a promoter) and a polynucleotide open reading frame. The expression cassette may optionally comprise a transcriptional and translational termination region (i.e., termination region) functional in plants. In some embodiments, the expression cassette comprises a selectable marker gene to allow for selection for stable transformants. Expression constructs of the invention may also comprise a leader sequence and/or a sequence allowing for inducible expression of the polynucleotide of interest.

[0094] The regulatory sequences of the expression construct are effectively linked to the polynucleotide of interest. The regulatory sequence in the present invention includes, but is not limited to, a promoter, a transit peptide, a terminator, an enhancer, a leader sequence, an intron and other regulatory sequences operably linked to the herbicide-tolerant gene encoding the mutant HPPD polypeptide.

[0095] The promoter is a plant expressible promoter. The “plant expressible promoter” refers to a promoter that ensures the expression of the coding sequence linked thereto in a plant cell. The plant expressible promoter can be a constitutive promoter. Examples of the promoters directing the constitutive expression in plants include, but are not limited to, a 35S promoter derived from a cauliflower mosaic virus, maize Ubi promoters, rice GOS2 gene promoters, and the like. Alternatively, the plant expressible promoter can be a tissue specific promoter, i.e. the promoter directs the expression of an coding sequence in several tissues, such as green tissues, at a level higher than in other tissues of the plant (which can be measured through conventional RNA trials), such as a PEP carboxylase promoter. Alternatively, the plant expressible promoter can be a wound-inducible promoter. The wound-inducible promoter or a promoter directing a wound-induced expression pattern means that when a plant suffers from a wound caused by a mechanical factor or the gnawing of insects, the expression of the coding sequence under the regulation of the promoter is significantly improved compared to normal growth conditions. Examples of the wound-inducible promoters include, but are not limited to, promoters of potato and tomato protease inhibitor genes (pin I and pin II) and a maize protease inhibitor gene (MPI).

[0096] The transit peptide (also known as secretion signal sequence or targeting sequence) directs a transgenic product to a specific organelle or cell compartment. For a receptor protein, the transit peptide may be heterologous, for example, targeting the chloroplast using a sequence encoding the chloroplast transit peptide, or targeting the endoplasmic reticulum using a ‘KDEL’ retention sequence, or targeting the vacuole using CTPP of a barley phytolectin gene.

[0097] The leader sequence includes, but is not limited to, a small RNA virus leader sequence, such as an EMCV leader sequence (a 5′ non-coding region of encephlomyocarditis virus); a potato virus Y group leader sequence, such as a MDMV (Maize Dwarf Mosaic Virus) leader sequence; human immunoglobulin heavy chain binding protein (BiP); an untranslated leader sequence of the coat protein mRNA of alfalfa mosaic virus (AMV RNA4); and a tobacco mosaic virus (TMV) leader sequence.

[0098] The enhancer includes, but is not limited to, a cauliflower mosaic virus (CaMV) enhancer, figwort mosaic virus (FMV) enhancer, carnation etched ring virus (CERV) enhancer, cassava vein mosaic virus (CsVMV) enhancer, mirabilis mosaic virus (MMV) enhancer, cestrum yellow leaf curling virus (CmYLCV) enhancer, cotton leaf curl Multan virus (CLCuMV) enhancer, commelina yellow mottle virus (CoYMV) enhancer and peanut chlorotic streak caulimovirus (PCLSV) enhancer.

[0099] For use in a monocotyledonous plant, the intron includes, but is not limited to, a maize hsp70 intron, maize ubiquitin intron, Adh intron 1, sucrose synthase intron or rice Act1 intron. For use in a dicotyledonous plant, the intron includes, but is not limited to, a CAT-1 intron, pKANNIBAL intron, PIV2 intron and “super ubiquitin” intron.

[0100] The terminator can be a suitable polyadenylation signal sequence that functions in a plant, including, but not limited to, a polyadenylation signal sequence derived from the Agrobacteriumtumefaciens nopaline synthetase (NOS) gene, a polyadenylation signal sequence derived from the protease inhibitor II (pinII) gene, a polyadenylation signal sequence derived from the pea ssRUBISCO E9 gene and a polyadenylation signal sequence derived from the α-tubulin gene.

[0101] The “effectively linking” in the present invention indicates the binding of nucleic acid sequences that enables one of the sequences to provide a function required for the sequence linked thereto. The “effectively linking” in the present invention can link a promoter to a sequence of interest, so that the transcription of the sequence of interest is controlled and regulated by the promoter. When a sequence of interest encodes a protein and the expression of the protein is desired, “effectively linking” means that: a promoter is linked to the sequence in such a manner that the resulting transcript is efficiently translated. If the linking of a promoter to a coding sequence is a transcript fusion and expression of the encoded protein is to be achieved, such linking is created that the first translation initiation codon in the resulting transcript is the initiation codon in the coding sequence. Alternatively, if the linking of a promoter to a coding sequence is a translation fusion and expression of the encoded protein is to be achieved, such a linking is created that the first translation initiation codon contained in the 5′ untranslated sequence is linked to the promoter in such a manner that the relationship of the resulting translation product with the translation open reading frame encoding the desired protein is an in-frame. Nucleic acid sequences that can be “effectively linked” include, but are not limited to: sequences providing gene expression functions (i.e., gene expression elements, such as promoters, 5′ untranslated regions, introns, protein coding regions, 3′ untranslated regions, polyadenylation sites and/or transcription terminators), sequences providing DNA transfer and/or integration functions (i.e., T-DNA boundary sequences, site-specific recombinase recognition sites and integrase recognition sites), sequences providing selective functions (i.e., antibiotic resistance markers and biosynthesis genes), sequences providing marker scoring functions, sequences assisting in sequence manipulation in vitro or in vivo (i.e., poly linker sequences and site-specific recombination sequences), and sequences providing replication functions (i.e., the bacterial origins of replication, autonomously replicating sequences and centromeric sequences).

[0102] The genome of a plant, plant tissue or plant cell in me present invention refers to any genetic material within the plant, plant tissue or plant cell, and includes nuclear, plastid and mitochondrial genomes.

[0103] As used herein, the term “plant part” or “plant tissue” includes plant cells, plant protoplasts, plant cell tissue cultures from which plants can be regenerated, plant calli, plant clumps, and plant cells that are intact in plants or parts of plants such as embryos, pollen, ovules, seeds, leaves, flowers, branches, fruit, kernels, ears, cobs, husks, stalks, roots, root tips, anthers, and the like.

[0104] The mutant HPPD polypeptide of the present invention can be applied to various types of plants. The dicotyledonous plant includes, but is not limited to, alfalfa, beans, cauliflowers, cabbages, carrots, celery, cotton, cucumbers, eggplants, lettuces, melon, peas, peppers, zucchinis, radishes, oilseed rape, spinach, soybeans, pumpkins, tomatoes, Arabidopsisthaliana, peanuts or watermelons; preferably, the dicotyledonous plant refers to cucumbers, soybeans, Arabidopsisthaliana, tobacco, cotton or oilseed rape. The monocotyledonous plant includes, but is not limited to, maize, rice, sorghum, wheat, barley, rye, millet, sugar cane, oats or turfgrass. Preferably, the monocotyledonous plant refers to maize, rice, sorghum, wheat, barley, millet, sugar cane or oats.

[0105] As used herein, the term “plant transformation” means that once an herbicide resistant or tolerant mutant HPPD polynucleotide, alone or in combination with one or more additional nucleic acid molecules encoding polypeptides that confer desirable traits, has been cloned into an expression system, it is transformed into a plant cell. The receptors and target expression cassettes of the present invention can be introduced into the plant cell in a number of art-recognized ways. The term “introducing” in the context of a polynucleotide, for example, a nucleotide construct of interest, is intended to mean presenting to the plant the polynucleotide in such a manner that the polynucleotide gains access to the interior of a cell of the plant. Where more than one polynucleotide is to be introduced, these polynucleotides can be assembled as part of a single nucleotide construct, or as separate nucleotide constructs, and can be located on the same or different transformation vectors. Accordingly, these polynucleotides can be introduced into the host cell of interest in a single transformation event, in separate transformation events, or, for example, in plants, as part of a breeding protocol. The methods of the invention do not depend on a particular method for introducing one or more polynucleotides into a plant, only that the polynucleotide(s) gains access to the interior of at least one cell of the plant. Methods for introducing one or more polynucleotides into plants are known in the art including, but not limited to, transient transformation methods, stable transformation methods, and virus-mediated methods or genome-editing techniques.

[0106] The term “stable transformation” means that an exogenous gene is introduced into the genome of the plant and stably integrates into the plant or its genome of any successive generations, so that the exogenous gene is stably inherited.

[0107] The term “transient transformation” means that a nucleic acid molecule or protein is introduced into the plant cell to execute the function, but does not integrate into the genome of the plant, so that an exogenous gene cannot be stably inherited.

[0108] The term “genome-editing technique” refers to the techniques used to modify the genome that are capable of precisely manipulating the genomic sequences to realize operations such as site-directed gene mutations, insertions and deletions. At present, the genome-editing techniques mainly include homing endonucleases (HEs), Zinc-finger nucleases (ZFNs), transcription activator-like effector nucleases (TALENs), and Clustered regulatory interspaced short palindromic repeat (CRISPR) technologies.

[0109] Numerous transformation vectors available for plant transformation are known to those of ordinary skills in the art, and the genes pertinent to this invention can be used in conjunction with any such vectors. The selection of vector will depend upon the preferred transformation technique and the target species for transformation. For certain target species, different antibiotic or herbicide selection markers may be preferred. Selection markers used routinely in transformation include the nptII gene (which was published by Bevan et al., Nature 304:184-187 (1983)), which confers resistance to kanamycin and related antibiotics or herbicides; the pat and bar genes, which confer resistance to the herbicide glufosinate (also called phosphinothricin; see White et al., Nucl. Acids Res 18: 1062 (1990), Spencer et al. Theon. Appl. Genet. 79: 625-631 (1990) and U.S. Pat. Nos. 5,561,236 and 5,276,268); the hph gene, which confers resistance to the antibiotic hygromycin (Blochinger & Diggelmann, Mol. Cell. Biol. 4: 2929-2931); the dhfr gene, which confers resistance to methatrexate (Bourouis et al., EMBO J. 2(7): 1099-1104 (1983)); the EPSPS gene, which confers resistance to glyphosate (U.S. Pat. Nos. 4,940,935 and 5,188,642); the glyphosate N-acetyltransferase (GAT) gene, which also confers resistance to glyphosate (Castle et al. (2004) Science, 304:1151-1154; U.S. Pat. App. Pub. Nos. 20070004912, 20050246798, and 20050060767); and the mannose-6-phosphate isomerase gene, which provides the ability to metabolize mannose (U.S. Pat. Nos. 5,767,378 and 5,994,629).

[0110] Methods for regeneration of plants are also well-known in the art. For example, Ti plasmid vectors have been utilized for the delivery of foreign DNA, as well as direct DNA uptake, liposomes, electroporation, microinjection, and microprojectiles.

[0111] The planting system in the present invention refers to a combination of a plant and any herbicide tolerance thereof and/or an herbicide treatment available in different plant developmental stages, thus producing a high-yielding and/or damage-reduced plant.

[0112] In the present invention, weeds refer to plants competing with the cultivated target plants in the plant growth environment.

[0113] The term “control” and/or “prevention” in the present invention refers to at least a direct application of (e.g., by spraying) an effective dose of an HPPD-inhibitor herbicide to the plant growth environment, so as to minimize weed development and/or stop weed growth. At the same time, the cultivated target plants should be morphologically normal and can be cultivated under conventional methods for product consumption and/or generation; and preferably, compared to non-transgenic wild-type plants, the cultivated plants have reduced plant damage and/or an increased plant yield. The reduced plant damage includes, but is not limited to, an improved stem resistance and/or an increased grain weight, etc. The “control” and/or “prevention” effect of the mutant HPPD polypeptide on weeds can exist independently, and will not be diminished and/or lost due to the presence of other substances that can “control” and/or “prevent” the weeds. Specifically, if any tissue of a transgenic plant (containing the gene encoding the mutant HPPD polypeptide) has and/or produces the mutant HPPD polypeptide and/or another substance that can control weeds simultaneously and/or separately, then the presence of the another substance will neither affect the “control” and/or “prevention” effect of the mutant HPPD polypeptide on the weeds, nor result in the “control” and/or “prevention” effect being completely and/or partially achieved by the another substance, regardless of the mutant HPPD polypeptide.

[0114] The “plant propagule” in the present invention includes, but is not limited to, plant sexual propagules and plant vegetative propagules. The plant sexual propagules include, but are not limited to, plant seeds; and the plant vegetative propagules refer to vegetative organs or a specific tissue of a plant which can generate a new plant under ex vivo conditions. The vegetative organs or the specific tissue include, but are not limited to, roots, stems and leaves, for example: plants with roots as the vegetative propagules including strawberries, sweet potatoes and the like; plants with stems as the vegetative propagules including sugar cane, potatoes (tubers) and the like; and plants with leaves as the vegetative propagules including aloe, begonias and the like.

[0115] The present invention may confer a new herbicide resistance trait to a plant, and no adverse effects on the phenotypes (including yields) are observed. The plant in the present invention can tolerate, e.g., 2×, 3×, 4× or 5× the general application level of at least one herbicide tested. The improvement of these levels of tolerance is within the scope of the present invention. For example, foreseeable optimization and further development can be performed on various techniques known in the art, in order to increase the expression of a given gene.

[0116] The present invention provides a mutant HPPD polypeptide, a coding gene and use thereof, having the following advantages:
[0117] 1. The present invention first discloses that various forms of mutations (preferably, mutations from phenylalanine to alanine, glycine or valine) occurring at position 372 of the HPPD polypeptide derived from different species or different ecotypes within the same species can confer higher tolerance to HPPD-inhibitor herbicides upon the plants, and in particular the tolerance to four-fold field concentration of topramezone, and thus has a very broad application prospect in plants.
[0118] 2. The mutation at position 372 of the HPPD polypeptide of the present invention in combination with those at other positions can also confer tolerance to topramezone upon the plants.

[0119] The technical solution of the present invention is further illustrated in details through the drawings and examples below.

### BRIEF DESCRIPTION OF THE DRAWINGS

[0120] FIG. 1 is a schematic structural diagram of a recombinant expression vector DBN11375 containing the AsHPPDm-F372A-02 nucleotide sequence for Arabidopsisthaliana according to the present invention;

[0121] FIG. 2 is a photo showing the tolerance of the Arabidopsis thaliana T₁ plants into which an Avenasativa HPPD gene (unmutated and mutated) was introduced to topramezone according to the present invention (A: wild-type Arabidopsisthaliana plants; B: Arabidopsisthaliana T₁ plants into which an AsHPPD-02 nucleotide was introduced; C: Arabidopsisthaliana T₁ plants into which an AsHPPDm-F372A-02 nucleotide sequence was introduced);

[0122] FIG. 3 is a phylogenetic tree of HPPDs from different species according to the present invention;

[0123] FIG. 4 is a series of photos showing the tolerance of Arabidopsisthaliana T₁ plants into which HPPD genes (unmutated and mutated) from different sources were introduced to topramezone according to the present invention (A: wild-type Arabidopsisthaliana plants; B: Arabidopsisthaliana T₁ plants into which unmutated HPPD genes (optimized according to codon usage bias) were introduced; C: Arabidopsisthaliana T₁ plants into which mutated HPPD genes (F372A) were introduced);

[0124] FIG. 5 is a schematic structural diagram of a control recombinant expression vector DBN11375NN according to the present invention;

[0125] FIG. 6 is a schematic structural diagram of a recombinant expression vector DBN11950 containing the AsHPPDm-F372A-02 nucleotide sequence for Oryzasativa according to the present invention;

[0126] FIG. 7 is a series of photos showing the tolerance of T₁ soybean plants into which a mutated HPPD gene was introduced to topramezone according to the present invention (A: soybean T₁ plants into which a control vector DBN11375NN was introduced; B: soybean T₁ plants into which an AsHPPDm-F372A-02 nucleotide sequence was introduced; C: soybean T₁ plants into which a ZmHPPDm-F372A-02 nucleotide sequence was introduced; D: soybean T₁ plants into which a PfHPPDm-F372A-02 nucleotide sequence was introduced; E: soybean T₁ plants into which an AsHPPDm-F372A-A110 nucleotide sequence was introduced; F: soybean T₁ plants into which a PfHPPDm-F372A-G413W nucleotide sequence was introduced).

### DETAILED DESCRIPTION OF THE INVENTION

[0127] The embodiments of the mutant hydroxyphenylpyruvate dioxygenase polypeptide, the coding gene and use thereof according to the present invention will be further illustrated in specific examples.

### Example 1: Selection of Position 372 of AsHPPD for Mutation and Verification of The Mutation Effect

### 1. Acquisition of AsHPPD and AsHPPDm-F372A Genes

[0128] The amino acid sequence (440 amino acids) of the Avenasativa native HPPD (AsHPPD) is set forth as SEQ ID NO: 1 in the SEQUENCE LISTING; the AsHPPD-01 nucleotide sequence (1323 nucleotides) encoding the AsHPPD is set forth as SEQ ID NO: 2 in the SEQUENCE LISTING, and the AsHPPD-02 nucleotide sequence encoding the AsHPPD, which was obtained based on the Arabidopsisthaliana/soybean/rice common codon usage bias, is set forth as SEQ ID NO: 3 in the SEQUENCE LISTING.

[0129] Position 372 of the AsHPPD amino acid sequence was mutated from the original phenylalanine (F) to alanine (A), to obtain a mutant AsHPPD (AsHPPDm-F372A) amino acid sequence as set forth in SEQ ID NO: 4 in the SEQUENCE LISTING. The mutant AsHPPD-01 (AsHPPDm-F372A-01) nucleotide sequence is set forth as SEQ ID NO: 5 in the SEQUENCE LISTING. The AsHPPDm-F372A-02 nucleotide sequence encoding the AsHPPDm-F372A, which was obtained based on the Arabidopsisthaliana/soybean/rice common codon usage bias, is set forth as SEQ ID NO: 6 in the SEQUENCE LISTING.

### 2. Synthesis of the Aforementioned Nucleotide Sequences

[0130] The 5′ and 3′ ends of the synthesized AsHPPD-02 nucleotide sequence (SEQ ID NO: 3) and AsHPPDm-F372A-02 nucleotide sequence (SEQ ID NO: 6) were respectively linked to a universal adapter primer 1:

[0131] Universal adapter primer 1 for the 5′ end: 5′-agtttttctgattaacagactagt-3′, as set forth in SEQ ID NO: 399 in the SEQUENCE LISTING; and

[0132] Universal adapter primer 1 for the 3′ end: 5′-caaatgtttgaacgatcggcgcgcc-3′, as set forth in SEQ ID NO: 400 in the SEQUENCE LISTING.

### 3. Construction of Recombinant Expression Vectors Containing Avena Sativa HPPD Genes (F372A) for Arabidopsis Thaliana

[0133] A plant expression vector DBNBC-01 was subjected to double digestion using restriction enzymes Spe I and Asc I to linearize the plant expression vector. The digestion product was purified to obtain the linearized DBNBC-01 expression vector backbone (vector backbone: pCAMBIA2301 (which is available from CAMBIA)) which then underwent a recombination reaction with the AsHPPDm-F372A-02 nucleotide sequence linked to the universal adapter primer 1, according to the procedure of Takara In-Fusion products seamless connection kit (Clontech, CA, USA, CAT: 121416) instructions, to construct a recombinant expression vector DBN11375 with the schematic structure as shown in FIG. 1 (Spec: spectinomycin gene; RB: right border; eFMV: 34S enhancer of Figwort mosaic virus (SEQ ID NO: 7); prBrCBP: promoter of oilseed rape eukaryotic elongation factor gene 1α (Tsf1) (SEQ ID NO: 8); spAtCTP2: Arabidopsisthaliana chloroplast transit peptide (SEQ ID NO: 9); EPSPS: 5-enolpyruvylshikimate-3-phosphate synthase gene (SEQ ID NO: 10); tPsE9: terminator of a pea RbcS gene (SEQ ID NO: 11); prAtUbi10: promoter of an Arabidopsisthaliana Ubiquitin 10 gene (SEQ ID NO: 12; AsHPPDm-F372A-02: AsHPPDm-F372A-02 nucleotide sequence (SEQ ID NO: 6); tNos: terminator of a nopaline synthase gene (SEQ ID NO: 13); pr35S: the cauliflower mosaic virus 35S promoter (SEQ ID NO: 14); PAT: phosphinothricin acetyltransferase gene (SEQ ID NO: 15); t35S: cauliflower mosaic virus 35S terminator (SEQ ID NO: 16); LB: left border).

[0134] Escherichia coli T₁ competent cells were transformed with the recombinant expression vector DBN11375 by using a heat shock method under the following heat shock conditions: 50 µL of Escherichia coli T₁ competent cells and 10 µL of plasmid DNA (recombinant expression vector DBN11375) were water-bathed at 42° C. for 30 seconds, shake cultured at 37° C. for 1 hour (using a shaker at a rotation speed of 100 rpm for shaking), and then cultured under the condition of a temperature of 37° C. on the LB solid plate containing 50 mg/L of spectinomycin for 12 hours; white bacterial colonies were picked out, and cultured under the condition of a temperature of 37° C. overnight in an LB liquid culture medium (10 g/L of tryptone, 5 g/L of yeast extract, 10 g/L of NaCl, and 50 mg/L of spectinomycin; adjusted to a pH of 7.5 with NaOH). The plasmids in the cells were extracted through an alkaline method: the bacteria solution was centrifuged at a rotation speed of 12,000 rpm for 1 min, the supernatant was removed, and the precipitated thalli were suspended with 100 µL of ice pre-cooled solution I (25 mM Tris-HCl, 10 mM EDTA (ethylenediaminetetraacetic acid), and 50 mM glucose, with a pH of 8.0); 200 µL of newly prepared solution II (0.2 M NaOH, 1% SDS (sodium dodecyl sulfate)) was added, mixed by inverting the tube 4 times, and placed on ice for 3-5 min; 150 µL of ice-cold solution III (3 M potassium acetate, 5 M acetic acid) was added, mixed uniformly immediately and placed on ice for 5-10 min; the mixture was centrifuged under the conditions of a temperature of 4° C. and a rotation speed of 12,000 rpm for 5 min, 2-fold volumes of anhydrous ethanol was added to the supernatant, mixed uniformly and placed at room temperature for 5 min; the mixture was centrifuged under the conditions of a temperature of 4° C. and a rotation speed of 12,000 rpm for 5 min, the supernatant was discarded, and the precipitate was washed with ethanol at a concentration of 70% (V/V) and then was air dried; 30 µL of TE (10 mM Tris-HCl, and 1 mM EDTA, with a pH of 8.0) containing RNase (20 µg/mL) was added to dissolve the precipitate; the obtained product was water bathed at a temperature of 37° C. for 30 min to digest the RNA; and stored at a temperature of -20° C. for use. The extracted plasmids were identified by sequencing. The results showed that the nucleotide sequence between the SpeI and AscI sites in the recombinant expression vector DBN11375 was the one as set forth in SEQ ID NO: 6 in the SEQUENCE LISTING, i.e., the AsHPPDm-F372A-02 nucleotide sequence.

[0135] According to the method for constructing the recombinant expression vector DBN11375 as described above, the AsHPPD-02 nucleotide sequence linked to the universal adapter primer 1 was subjected to a recombination reaction with the linearized DBNBC-01 expression vector backbone to constructe a recombinant expression vector DBN11375N. Sequencing verified that the nucleotide sequence in the recombinant expression vector DBN11375N comprises the one as set forth in SEQ ID NO: 3 in the SEQUENCE LISTING; i.e., the AsHPPD-02 nucleotide sequence was inserted correctly.

### 4. Transformation of Agrobacterium with the Recombinant Expression Vectors for Arabidopsis Thaliana

[0136] The recombinant expression vectors DBN11375 and DBN11375N which had been constructed correctly were respectively transformed into Agrobacterium GV3101 using a liquid nitrogen method, under the following transformation conditions: 100 µL of Agrobacterium GV3101 and 3 µL of plasmid DNA (recombinant expression vector) were placed in liquid nitrogen for 10 minutes, and bathed in warm water at 37° C. for 10 min; the transformed Agrobacterium GV3101 was inoculated into an LB tube, cultured under the conditions of a temperature of 28° C. and a rotation speed of 200 rpm for 2 hours, and spread on the LB solid plate containing 50 mg/L of rifampicin and 50 mg/L of spectinomycin until positive single clones were grown, and single clones were picked out for culturing and the plasmids thereof were extracted. The extracted plasmids were identified by sequencing. The results showed that the structures of the recombinant expression vectors DBN11375 and DBN1137SN were completely correct.

### 5. Acquisition of Transgenic Arabidopsis Thaliana Plants

[0137] Seeds of wild-type Arabidopsisthaliana were suspended in a 0.1% (w/v) agarose solution. The suspended seeds were stored at 4° C. for 2 days to fulfill the need for dormancy, in order to ensure synchronous seed germination. Vermiculite was mixed with horse manure soil, the mixture was sub-irrigated with water to wet, and the soil mixture was allowed to drain the water away for 24 hours. The pretreated seeds were sowed in the soil mixture and covered with a moisturizing cover for 7 days. The seeds were germinated and the plants were cultivated in a greenhouse under long sunlight conditions (16-hour light/8-hour dark) at a constant temperature (22° C.) and a constant humidity (40-50%), with a light intensity of 120-150 µmol/m²s⁻¹. The plants were initially irrigated with Hoagland’s nutrient solution and then with deionized water, thus keeping the soil moist, but not water penetrated.

[0138] Arabidopsisthaliana was transformed using the flower soaking method. One or more 15-30 mL pre-cultures of a LB culture solution (10 g/L of tryptone, 5 g/L of yeast extract, and 10 g/L of NaCl; adjusted to a pH of 7.5 with NaOH) containing spectinomycin (50 mg/L) and rifampicin (10 mg/L) were inoculated with the picked Agrobacterium colonies. The pre-cultures were incubated at a temperature of 28° C. and a rotation speed of 220 rpm with shaking at a constant speed overnight. Each pre-culture was used to inoculate two 500 mL cultures of the LB culture solution containing spectinomycin (50 mg/L) and rifampicin (10 mg/L), and the cultures were incubated at 28° C. with continuous shaking overnight. Centrifugation at a rotation speed of about 4,000 rpm was carried out at room temperature for 20 minutes to precipitate cells, and the resulting supernatant was discarded. The cell precipitate was gently re-suspended in 500 mL of an osmotic medium which contained ½×MS salt/B5 vitamin, 10% (w/v) sucrose, 0.044 µM of benzylaminopurine (10 µL/L (1 mg/mL stock solution in DMSO)) and 300 µL/L of Silvet L-77. About 1-month-old Arabidopsisthaliana plants were soaked in an osmotic culture medium which contained re-suspended cells for 15 seconds to ensure immersion of the latest inflorescence. Then, the Arabidopsisthaliana plants were reclined laterally and covered and they were kept wet in dark for 24 hours. The Arabidopsisthaliana plants were normally cultivated with a photoperiod of 16 hours of light/8 hours of darkness at 22° C. Seeds were harvested after about 4 weeks.

[0139] The newly harvested (AsHPPDm-F372A-02 nucleotide sequence and AsHPPD-02 nucleotide sequence) T₁ seeds were dried at room temperature for 7 days. The seeds were sowed in 26.5 cm ×51 cm germination disks, and 200 mg of T₁ seeds (about 10,000 seeds) were accepted per disk, wherein the seeds had been previously suspended in distilled water and stored at 4° C. for 2 days to fulfill the need for dormancy, in order to ensure synchronous seed germination.

[0140] Vermiculite was mixed with horse manure soil, the mixture was sub-irrigated with water to wet, and water was drained by gravity. The pretreated seeds were sowed evenly in the soil mixture using a pipette, and covered with a moisturizing cover for 4-5 days. The cover was removed 1 day before the post-emergence spraying application of glufosinate (used to select the co-transformed PAT gene) for the selection of initial transformant.

[0141] The T₁ plants were sprayed with a 0.2% solution of a Liberty herbicide (200 g ai/L of glufosinate) by a DeVilbiss compressed air nozzle at a spray volume of 10 mL/disk (703 L/ha) 7 days after planting (DAP) and 11 DAP (the cotyledon stage and 2-4 leaf stage, respectively) to provide an effective amount of glufosinate of 280 g ai/ha per application. Surviving plants (actively growing plants) were identified 4-7 days after the final spraying, and transplanted to 7 cm×7 cm square pots prepared from horse manure soil and vermiculite (3-5 plants/disk). The transplanted plants were covered with a moisturizing cover for 3-4 days, and placed in a 22° C. culture chamber or directly transferred into a greenhouse as described above. Then, the cover was removed, and at least 1 day before testing the ability of the mutant HPPD gene to provide topramezone herbicide tolerance, the plants were planted in a greenhouse (22±5° C., 50±30% RH, 14 hours of light: 10 hours of darkness, a minimum of 500 µE/m²s⁻¹ natural+supplemental light).

### 6. Detection of the Herbicide Tolerance of the Transgenic Arabidopsis Thaliana Plants Containing the AsHPPDm-F372A-02 Nucleotide Sequence.

[0142] T₁ transformants were initially selected from the untransformed seeds using a glufosinate selection scheme. About 20,000 T₁ seeds were screened, and 314 T₁ generation positive transformants (PAT gene) were identified, with a transformation efficiency of about 1.6%.

[0143] The Arabidopsisthaliana T₁ plants into which the AsHPPDm-F372A-02 nucleotide sequence was introduced, Arabidopsis thaliana T₁ plants into which the AsHPPD-02 nucleotide sequence was introduced and wild-type Arabidopsisthaliana plants (18 days after sowing) were sprayed with topramezone at four different concentrations, i.e., 25 g ai/ha (one-fold field concentration, 1×), 50 g ai/ha (two-fold field concentration, 2×), 100 g ai/ha (four-fold field concentration, 4×) and 0 g ai/ha (water, 0×) to determine the tolerance of Arabidopsisthaliana to the herbicide. The degree of damage caused by the herbicide was measured for each plant according to the proportion of bleached leaf area (the proportion of bleached leaf area=bleached leaf area/total leaf area×100%) 7 days after spraying (7 DAT): the case where there is basically no bleached phenotype is defined as grade 0, the case where the proportion of bleached leaf area is less than 50% is defined as grade 1,the case where the proportion of bleached leaf area is more than 50% is defined as grade 2, and the case where the proportion of bleached leaf area is 100% grade is defined as grade 3.

[0144] According to the formula X=[Σ(N×S)/(T×M)]×100, the performance of resistance of the transformation event of each recombinant expression vector was scored (X-the score for pesticide damage, N-the number of plants with the same grade of damage, S- the pesticide damage grade, T-the total number of plants, M-the maximum grade of pesticide damage) and the resistance is evaluated based on the scores: highly resistant plants (scores 0-15), moderately resistant plants (scores 16-33), poorly resistant plants (scores 34-67) and non-resistant plants (scores 68-100). The experimental results are shown in TABLE 1 and FIG. 2.

TABLE 1

Topramezone tolerance of transgenic Arabidopsis thaliana T₁ plants

| Arabidopsis thaliana genotypes | Concentration (g ai/ha) | Classification and statistics of the grade of pesticide damage | | | | Scores | Resistance evaluation |
|---|---|---|---|---|---|---|---|
| | | Grade 0 | Grade 1 | Grade 2 | Grade 3 | | |
| Wild type | 0 | 16 | 0 | 0 | 0 | 0 | |
| | 25 | 0 | 0 | 0 | 16 | 100 | non-resistant |
| | 50 | 0 | 0 | 0 | 16 | 100 | non-resistant |
| | 100 | 0 | 0 | 0 | 16 | 100 | non-resistant |
| AsHPPD-02 | 0 | 16 | 0 | 0 | 0 | 0 | |
| | 25 | 0 | 4 | 12 | 0 | 58 | poorly resistant |
| | 50 | 0 | 0 | 6 | 10 | 88 | non-resistant |
| | 100 | 0 | 0 | 4 | 12 | 92 | non-resistant |
| AsHPPDm-F372A-02 | 0 | 16 | 0 | 0 | 0 | 0 | |
| | 25 | 16 | 0 | 0 | 0 | 0 | highly resistant |
| | 50 | 16 | 0 | 0 | 0 | 0 | highly resistant |
| | 100 | 16 | 0 | 0 | 0 | 0 | highly resistant |

[0145] The results of TABLE 1 and FIG. 2 show that the Arabidopsisthaliana T₁ plants into which the AsHPPDm-F372A-02 nucleotide sequence was introduced had a good tolerance to (highly resistant to) topramezone, while the wild-type Arabidopsisthaliana plants and the Arabidopsisthaliana T₁ plants into which the AsHPPD-02 nucleotide was introduced had no or relatively low tolerance to topramezone at various concentrations. Thus, it is inferred that mutation of position 372 of the HPPD amino acid sequence (F372A) can confer tolerance to topramezone upon the plants.

### Example 2: Mutation of Position 372 of the HPPD Amino Acid Sequences From Different Species (F372A) and Verification of the Mutation Effect

[0146] In order to further verify the effect of mutation of position 372 of the HPPD amino acid sequence, a phylogenetic tree of HPPDs from different species (as shown in FIG. 3) was analyzed. HPPDs from representative species on different branches were selected and position 372 of the amino acid sequence was mutated (F372A) so as to verify the mutation effect.

### 1. Acquisition of HPPDs From Different Species and Mutant HPPDs (F372A)

[0147] The amino acid sequence (444 amino acids) of the native Zeamays HPPD (ZmHPPD) is set forth as SEQ ID NO: 17 in the SEQUENCE LISTING; the ZmHPPD-01 nucleotide sequence (1335 nucleotides) encoding the ZmHPPD is set forth as SEQ ID NO: 18 in the SEQUENCE LISTING, and the ZmHPPD-02 nucleotide sequence encoding the ZmHPPD, which was obtained based on the Arabidopsisthaliana/soybean/rice common codon usage bias, is set forth as SEQ ID NO: 19 in the SEQUENCE LISTING. Position 372 of the ZmHPPD amino acid sequence was mutated from the original phenylalanine to alanine to obtain a mutant ZmHPPD (ZmHPPDm-F372A) amino acid sequence as set forth in SEQ ID NO: 20 in the SEQUENCE LISTING. The mutant ZmHPPD-01 (ZmHPPDm-F372A-01) nucleotide sequence is set forth as SEQ ID NO: 21 in the SEQUENCE LISTING. The ZmHPPDm-F372A-02 nucleotide sequence encoding the ZmHPPDm-F372A, which was obtained based on the Arabidopsisthaliana/soybean/rice common codon usage bias, is set forth as SEQ ID NO: 22 in the SEQUENCE LISTING.

[0148] The amino acid sequence (445 amino acids) of the native Arabidopsisthaliana HPPD (AtHPPD) is set forth as SEQ ID NO: 23 in the SEQUENCE LISTING; the AtHPPD nucleotide sequence (1338 nucleotides) encoding the AtHPPD is set forth as SEQ ID NO: 24 in the SEQUENCE LISTING. Position 372 of the AtHPPD amino acid sequence was mutated from the original phenylalanine to alanine to obtain a mutant AtHPPD (AtHPPDm-F372A) amino acid sequence as set forth in SEQ ID NO: 25 in the SEQUENCE LISTING. The AtHPPDm-F372A nucleotide sequence encoding the AtHPPDm-F372A is set forth as SEQ ID NO: 26 in the SEQUENCE LISTING.

[0149] The amino acid sequence (358 amino acids) of the native Pseudomonasfluorescens HPPD (PfHPPD) is set forth as SEQ ID NO: 27 in the SEQUENCE LISTING; the PfHPPD-01 nucleotide sequence (1077 nucleotides) encoding the PfHPPD is set forth as SEQ ID NO: 28 in the SEQUENCE LISTING, and the PfHPPD-02 nucleotide sequence encoding the PtHPPD, which was obtained based on the Arabidopsisthaliana/soybean/rice common codon usage bias, is set forth as SEQ ID NO: 29 in the SEQUENCE LISTING. Position 372 of the PfHPPD amino acid sequence was mutated from the original phenylalanine to alanine to obtain a mutant PfHPPD (PfHPPDm-F372A) amino acid sequence as set forth in SEQ ID NO: 30 in the SEQUENCE LISTING. The mutant PfHPPD-01 (PfHPPDm-F372A-01) nucleotide sequence is set forth as SEQ ID NO: 31 in the SEQUENCE LISTING. The PfHPPDm-F372A-02 nucleotide sequence encoding the PfHPPDm-F372A, which was obtained based on the Arabidopsisthaliana/soybean/rice common codon usage bias, is set forth as SEQ ID NO: 32 in the SEQUENCE LISTING.

[0150] The amino acid sequence (436 amino acids) of the native Gossypiumhirsutum HPPD (GsHPPD) is set forth as SEQ ID NO: 33 in the SEQUENCE LISTING; the GsHPPD-01 nucleotide sequence (1311 nucleotides) encoding the GsHPPD is set forth as SEQ ID NO: 34 in the SEQUENCE LISTING, and the GsHPPD-02 nucleotide sequence encoding the GsHPPD, which was obtained based on the Arabidopsisthaliana codon usage bias, is set forth as SEQ ID NO: 35 in the SEQUENCE LISTING. Position 372 of the GsHPPD amino acid sequence was mutated from the original phenylalanine to alanine to obtain a mutant GsHPPD (GsHPPDm-F372A) amino acid sequence as set forth in SEQ ID NO: 36 in the SEQUENCE LISTING. The mutant GsHPPD-01 (GsHPPDm-F372A-01) nucleotide sequence is set forth as SEQ ID NO: 37 in the SEQUENCE LISTING. The GsHPPDm-F372A-02 nucleotide sequence encoding the GsHPPDm-F372A, which was obtained based on the Arabidopsisthaliana codon usage bias, is set forth as SEQ ID NO: 38 in the SEQUENCE LISTING.

[0151] The amino acid sequence (436 amino acids) of the native Triticumaestivum HPPD (TaHPPD) is set forth as SEQ ID NO: 39 in the SEQUENCE LISTING; the TaHPPD-01 nucleotide sequence (1311 nucleotides) encoding the TaHPPD is set forth as SEQ ID NO: 40 in the SEQUENCE LISTING, and the TaHPPD-02 nucleotide sequence encoding the TaHPPD, which was obtained based on the Arabidopsisthaliana codon usage bias, is set forth as SEQ ID NO: 41 in the SEQUENCE LISTING. Position 372 of the TaHPPD amino acid sequence was mutated from the original phenylalanine to alanine to obtain a mutant TaHPPD (TaHPPDm-F372A) amino acid sequence as set forth in SEQ ID NO: 42 in the SEQUENCE LISTING. The mutant TaHPPD-01 (TaHPPDm-F372A-01) nucleotide sequence is set forth as SEQ ID NO: 43 in the SEQUENCE LISTING. The TaHPPDm-F372A-02 nucleotide sequence encoding the TaHPPDm-F372A, which was obtained based on the Arabidopsisthaliana codon usage bias, is set forth as SEQ ID NO: 44 in the SEQUENCE LISTING.

[0152] The amino acid sequence (436 amino acids) of the native Brachypodiumdistachyon HPPD (BdHPPD) is set forth as SEQ ID NO: 45 in the SEQUENCE LISTING; the BdHPPD-01 nucleotide sequence (1311 nucleotides) encoding the BdHPPD is set forth as SEQ ID NO: 46 in the SEQUENCE LISTING, and the BdHPPD-02 nucleotide sequence encoding the BdHPPD, which was obtained based on the Arabidopsisthaliana codon usage bias, is set forth as SEQ ID NO: 47 in the SEQUENCE LISTING. Position 372 of the BdHPPD amino acid sequence was mutated from the original phenylalanine to alanine to obtain a mutant BdHPPD (BdHPPDm-F372A) amino acid sequence as set forth in SEQ ID NO: 48 in the SEQUENCE LISTING. The mutant BdHPPD-01 (BdHPPDm-F372A-01) nucleotide sequence is set forth as SEQ ID NO: 49 in the SEQUENCE LISTING. The BdHPPDm-F372A-02 nucleotide sequence encoding the BdHPPDm-F372A, which was obtained based on the Arabidopsisthaliana codon usage bias, is set forth as SEQ ID NO: 50 in the SEQUENCE LISTING.

[0153] The amino acid sequence (434 amino acids) of the native Hordeumvulgare HPPD (HvHPPD) is set forth as SEQ ID NO: 51 in the SEQUENCE LISTING; the HvHPPD-01 nucleotide sequence (1305 nucleotides) encoding the HvHPPD is set forth as SEQ ID NO: 52 in the SEQUENCE LISTING, and the HvHPPD-02 nucleotide sequence encoding the HvHPPD, which was obtained based on the Arabidopsisthaliana codon usage bias, is set forth as SEQ ID NO: 53 in the SEQUENCE LISTING. Position 372 of the HvHPPD amino acid sequence was mutated from the original phenylalanine to alanine to obtain a mutant HvHPPD (HvHPPDm-F372A) amino acid sequence as set forth in SEQ ID NO: 54 in the SEQUENCE LISTING. The mutant HvHPPD-01 (HvHPPDm-F372A-01) nucleotide sequence is set forth as SEQ ID NO: 55 in the SEQUENCE LISTING. The HvHPPDm-F372A-02 nucleotide sequence encoding the HvHPPDm-F372A, which was obtained based on the Arabidopsisthaliana codon usage bias, is set forth as SEQ ID NO: 56 in the SEQUENCE LISTING.

[0154] The ammo acid sequence (441 amino acids) of the native Setariaitalica HPPD (SiHPPD) is set forth as SEQ ID NO: 57 in the SEQUENCE LISTING; the SiHPPD-01 nucleotide sequence (1326 nucleotides) encoding the SiHPPD is set forth as SEQ ID NO: 58 in the SEQUENCE LISTING, and the SiHPPD-02 nucleotide sequence encoding the SiHPPD, which was obtained based on the Arabidopsisthaliana codon usage bias, is set forth as SEQ ID NO: 59 in the SEQUENCE LISTING. Position 372 of the SiHPPD amino acid sequence was mutated from the original phenylalanine to alanine to obtain a mutant SiHPPD (SiHPPDm-F372A) amino acid sequence as set forth in SEQ ID NO: 60 in the SEQUENCE LISTING. The mutant SiHPPD-01 (SiHPPDm-F372A-01) nucleotide sequence is set forth as SEQ ID NO: 61 in the SEQUENCE LISTING. The SiHPPDm-F372A-02 nucleotide sequence encoding the SiHPPDm-F372A, which was obtained based on the Arabidopsisthaliana codon usage bias, is set forth as SEQ ID NO: 62 in the SEQUENCE LISTING.

[0155] The amino acid sequence (440 amino acids) of the native Sorghum bicolor HPPD (SbHPPD) is set forth as SEQ ID NO: 63 in the SEQUENCE LISTING; the SbHPPD-01 nucleotide sequence (1323 nucleotides) encoding the SbHPPD is set forth as SEQ ID NO: 64 in the SEQUENCE LISTING, and the SbHPPD-02 nucleotide sequence encoding the SbHPPD, which was obtained based on the Arabidopsisthaliana codon usage bias, is set forth as SEQ ID NO: 65 in the SEQUENCE LISTING. Position 372 of the SbHPPD amino acid sequence was mutated from the original phenylalanine to alanine to obtain a mutant SbHPPD (SbHPPDm-F372A) amino acid sequence as set forth in SEQ ID NO: 66 in the SEQUENCE LISTING. The mutant SbHPPD-01 (SbHPPDm-F372A-01) nucleotide sequence is set forth as SEQ ID NO: 67 in the SEQUENCE LISTING. The SbHPPDm-F372A-02 nucleotide sequence encoding the SbHPPDm-F372A, which was obtained based on the Arabidopsisthaliana codon usage bias, is set forth as SEQ ID NO: 68 in the SEQUENCE LISTING.

[0156] The amino acid sequence (446 amino acids) of the native Oryzasativa HPPD (OsHPPD) is set forth as SEQ ID NO: 69 in the SEQUENCE LISTING; the OsHPPD-01 nucleotide sequence (1341 nucleotides) encoding the OsHPPD is set forth as SEQ ID NO: 70 in the SEQUENCE LISTING, and the OsHPPD-02 nucleotide sequence encoding the OsHPPD, which was obtained based on the Arabidopsisthaliana codon usage bias, is set forth as SEQ ID NO: 71 in the SEQUENCE LISTING. Position 372 of the OsHPPD amino acid sequence was mutated from the original phenylalanine to alanine to obtain a mutant OsHPPD (OsHPPDm-F372A) amino acid sequence as set forth in SEQ ID NO: 72 in the SEQUENCE LISTING. The mutant OsHPPD-01 (OsHPPDm-F372A-01) nucleotide sequence is set forth as SEQ ID NO: 73 in the SEQUENCE LISTING. The OsHPPDm-F372A-02 nucleotide sequence encoding the OsHPPDm-F372A, which was obtained based on the Arabidopsisthaliana codon usage bias, is set forth as SEQ ID NO: 74 in the SEQUENCE LISTING.

[0157] The amino acid sequence (488 amino acids) of the native Glycine max HPPD (GmHPPD) is set forth as SEQ ID NO: 75 in the SEQUENCE LISTING; the GmHPPD-01 nucleotide sequence (1467 nucleotides) encoding the GmHPPD is set forth as SEQ ID NO: 76 in the SEQUENCE LISTING, and the GmHPPD-02 nucleotide sequence encoding the GmHPPD, which was obtained based on the Arabidopsisthaliana codon usage bias, is set forth as SEQ ID NO: 77 in the SEQUENCE LISTING. Position 372 of the GmHPPD amino acid sequence was mutated 31 from the original phenylalanine to alanine to obtain a mutant GmHPPD (GmHPPDm-F372A) amino acid sequence as set forth in SEQ ID NO: 78 in the SEQUENCE LISTING. The mutant GmHPPD-01 (GmHPPDm-F372A-01) nucleotide sequence is set forth as SEQ ID NO: 79 in the SEQUENCE LISTING. The GmHPPDm-F372A-02 nucleotide sequence encoding the GmHPPDm-F372A, which was obtained based on the Arabidopsisthaliana codon usage bias, is set forth as SEQ ID NO: 80 in the SEQUENCE LISTING.

[0158] The amino acid sequence (434 amino acids) of the native Cicerarietinum HPPD (CaHPPD) is set forth as SEQ ID NO: 81 in the SEQUENCE LISTING; the CaHPPD-01 nucleotide sequence (1305 nucleotides) encoding the CaHPPD is set forth as SEQ ID NO: 82 in the SEQUENCE LISTING, and the CaHPPD-02 nucleotide sequence encoding the CaHPPD, which was obtained based on the Arabidopsisthaliana codon usage bias, is set forth as SEQ ID NO: 83 in the SEQUENCE LISTING. Position 372 of the CaHPPD amino acid sequence was mutated from the original phenylalanine to alanine to obtain a mutant CaHPPD (CaHPPDm-F372A) amino acid sequence as set forth in SEQ ID NO: 84 in the SEQUENCE LISTING. The mutant CaHPPD-01 (CaHPPDm-F372A-01) nucleotide sequence is set forth as SEQ ID NO: 85 in the SEQUENCE LISTING. The CaHPPDm-F372A-02 nucleotide sequence encoding the CaHPPDm-F372A, which was obtained based on the Arabidopsisthaliana codon usage bias, is set forth as SEQ ID NO: 86 in the SEQUENCE LISTING.

[0159] The amino acid sequence (443 amino acids) of the native Brassicanapus HPPD (BnHPPD) is set forth as SEQ ID NO: 87 in the SEQUENCE LISTING; the BnHPPD-01 nucleotide sequence (1332 nucleotides) encoding the BnHPPD is set forth as SEQ ID NO: 88 in the SEQUENCE LISTING, and the BnHPPD-02 nucleotide sequence encoding the BnHPPD, which was obtained based on the Arabidopsisthaliana codon usage bias, is set forth as SEQ ID NO: 89 in the SEQUENCE LISTING. Position 372 of the BnHPPD amino acid sequence was mutated from the original phenylalanine to alanine to obtain a mutant BnHPPD (BnHPPDm-F372A) amino acid sequence as set forth in SEQ ID NO: 90 in the SEQUENCE LISTING. The mutant BnHPPD-01 (BnHPPDm-F372A-01) nucleotide sequence is set forth as SEQ ID NO: 91 in the SEQUENCE LISTING. The BnHPPDm-F372A-02 nucleotide sequence encoding the BnHPPDm-F372A, which was obtained based on the Arabidopsisthaliana codon usage bias, is set forth as SEQ ID NO: 92 in the SEQUENCE LISTING.

[0160] The amino acid sequence (451 amino acids) of the native Helianthusannuus HPPD (HaHPPD) is set forth as SEQ ID NO: 93 in the SEQUENCE LISTING; the HaHPPD-01 nucleotide sequence (1356 nucleotides) encoding the HaHPPD is set forth as SEQ ID NO: 94 in the SEQUENCE LISTING, and the HaHPPD-02 nucleotide sequence encoding the HaHPPD, which was obtained based on the Arabidopsisthaliana codon usage bias, is set forth as SEQ ID NO: 95 in the SEQUENCE LISTING. Position 372 of the HaHPPD amino acid sequence was mutated from the original phenylalanine to alanine to obtain a mutant HaHPPD (HaHPPDm-F372A) amino acid sequence as set forth in SEQ ID NO: 96 in the SEQUENCE LISTING. The mutant HaHPPD-01 (HaHPPDm-F372A-01) nucleotide sequence is set forth as SEQ ID NO: 97 in the SEQUENCE LISTING. The HaHPPDm-F372A-02 nucleotide sequence encoding the HaHPPDm-F372A, which was obtained based on the Arabidopsisthaliana codon usage bias, is set forth as SEQ ID NO: 98 in the SEQUENCE LISTING.

[0161] The amino acid sequence (435 amino acids) of the native Medicagosativa HPPD (MsHPPD) is set forth as SEQ ID NO: 99 in the SEQUENCE LISTING; the MsHPPD-01 nucleotide sequence (1308 nucleotides) encoding the MsHPPD is set forth as SEQ ID NO: 100 in the SEQUENCE LISTING, and the MsHPPD-02 nucleotide sequence encoding the MsHPPD, which was obtained based on the Arabidopsisthaliana codon usage bias, is set forth as SEQ ID NO: 101 in the SEQUENCE LISTING. Position 372 of the MsHPPD amino acid sequence was mutated from the original phenylalanine to alanine to obtain a mutant MsHPPD (MsHPPDm-F372A) amino acid sequence as set forth in SEQ ID NO: 102 in the SEQUENCE LISTING. The mutant MsHPPD-01 (MsHPPDm-F372A-01) nucleotide sequence is set forth as SEQ ID NO: 103 in the SEQUENCE LISTING. The MsHPPDm-F372A-02 nucleotide sequence encoding the MsHPPDm-F372A, which was obtained based on the Arabidopsisthaliana codon usage bias, is set forth as SEQ ID NO: 104 in the SEQUENCE LISTING.

[0162] The amino acid sequence (434 amino acids) of the native Betavulgaris HPPD (BvHPPD) is set forth as SEQ ID NO: 105 in the SEQUENCE LISTING; the BvHPPD-01 nucleotide sequence (1305 nucleotides) encoding the BvHPPD is set forth as SEQ ID NO: 106 in the SEQUENCE LISTING, and the BvHPPD-02 nucleotide sequence encoding the BvHPPD, which was obtained based on the Arabidopsisthaliana codon usage bias, is set forth as SEQ ID NO: 107 in the SEQUENCE LISTING. Position 372 of the BvHPPD amino acid sequence was mutated from the original phenylalanine to alanine to obtain a mutant BvHPPD (BvHPPDm-F372A) amino acid sequence as set forth in SEQ ID NO: 108 in the SEQUENCE LISTING. The mutant BvHPPD-01 (BvHPPDm-F372A-01) nucleotide sequence is set forth as SEQ ID NO: 109 in the SEQUENCE LISTING. The BvHPPDm-F372A-02 nucleotide sequence encoding the BvHPPDm-F372A, which was obtained based on the Arabidopsisthaliana codon usage bias, is set forth as SEQ ID NO: 110 in the SEQUENCE LISTING.

[0163] The amino acid sequence (447 amino acids) of the native Nicotianatabacum HPPD (NtHPPD) is set forth as SEQ ID NO: 111 in the SEQUENCE LISTING; the NtHPPD-01 nucleotide sequence (1344 nucleotides) encoding the NtHPPD is set forth as SEQ ID NO: 112 in the SEQUENCE LISTING, and the NtHPPD-02 nucleotide sequence encoding the NtHPPD, which was obtained based on the Arabidopsisthaliana codon usage bias, is set forth as SEQ ID NO: 113 in the SEQUENCE LISTING. Position 372 of the NtHPPD amino acid sequence was mutated from the original phenylalanine to alanine to obtain a mutant NtHPPD (NtHPPDm-F372A) amino acid sequence as set forth in SEQ ID NO: 114 in the SEQUENCE LISTING. The mutant NtHPPD-01 (NtHPPDm-F372A-01) nucleotide sequence is set forth as SEQ ID NO: 115 in the SEQUENCE LISTING. The NtHPPDm-F372A-02 nucleotide sequence encoding the NtHPPDm-F372A, which was obtained based on the Arabidopsisthaliana codon usage bias, is set forth as SEQ ID NO: 116 in the SEQUENCE LISTING.

[0164] The amino acid sequence (455 amino acids) of the native Cucumissativus HPPD (CsHPPD) is set forth as SEQ ID NO: 117 in the SEQUENCE LISTING; the CsHPPD-01 nucleotide sequence (1368 nucleotides) encoding the CsHPPD is set forth as SEQ ID NO: 118 in the SEQUENCE LISTING, and the CsHPPD-02 nucleotide sequence encoding the CsHPPD, which was obtained based on the Arabidopsisthaliana codon usage bias, is set forth as SEQ ID NO: 119 in the SEQUENCE LISTING. Position 372 of the CsHPPD amino acid sequence was mutated from the original phenylalanine to alanine to obtain a mutant CsHPPD (CsHPPDm-F372A) amino acid sequence as set forth in SEQ ID NO: 120 in the SEQUENCE LISTING. The mutant CsHPPD-01 (CsHPPDm-F372A-01) nucleotide sequence is set forth as SEQ ID NO: 121 in the SEQUENCE LISTING. The CsHPPDm-F372A-02 nucleotide sequence encoding the CsHPPDm-F372A, which was obtained based on the Arabidopsisthaliana codon usage bias, is set forth as SEQ ID NO: 122 in the SEQUENCE LISTING.

[0165] The amino acid sequence (447 amino acids) of the native Solanumtuberosum HPPD (StHPPD) is set forth as SEQ ID NO: 123 in the SEQUENCE LISTING; the StHPPD-01 nucleotide sequence (1343 nucleotides) encoding the StHPPD is set forth as SEQ ID NO: 124 in the SEQUENCE LISTING, and the StHPPD-02 nucleotide sequence encoding the StHPPD, which was obtained based on the Arabidopsisthaliana codon usage bias, is set forth as SEQ ID NO: 125 in the SEQUENCE LISTING. Position 372 of the StHPPD amino acid sequence was mutated from the original phenylalanine to alanine to obtain a mutant StHPPD (StHPPDm-F372A) amino acid sequence as set forth in SEQ ID NO: 126 in the SEQUENCE LISTING. The mutant StHPPD-01 (StHPPDm-F372A-01) nucleotide sequence is set forth as SEQ ID NO: 127 in the SEQUENCE LISTING. The StHPPDm-F372A-02 nucleotide sequence encoding the StHPPDm-F372A, which was obtained based on the Arabidopsisthaliana codon usage bias, is set forth as SEQ ID NO: 128 in the SEQUENCE LISTING.

[0166] The amino acid sequence (441 amino acids) of the native Solanumlycopersicum HPPD (S1HPPD) is set forth as SEQ ID NO: 129 in the SEQUENCE LISTING; the S1HPPD-01 nucleotide sequence (1326 nucleotides) encoding the S1HPPD is set forth as SEQ ID NO: 130 in the SEQUENCE LISTING, and the S1HPPD-02 nucleotide sequence encoding the S1HPPD, which was obtained based on the Arabidopsisthaliana codon usage bias, is set forth as SEQ ID NO: 131 in the SEQUENCE LISTING. Position 372 of the S1HPPD amino acid sequence was mutated from the original phenylalanine to alanine to obtain a mutant S1HPPD (S1HPPDm-F372A) amino acid sequence as set forth in SEQ ID NO: 132 in the SEQUENCE LISTING. The mutant S1HPPD-01 (S1HPPDm-F372A-01) nucleotide sequence is set forth as SEQ ID NO: 133 in the SEQUENCE LISTING. The S1HPPDm-F372A-02 nucleotide sequence encoding the S1HPPDm-F372A, which was obtained based on the Arabidopsisthaliana codon usage bias, is set forth as SEQ ID NO: 134 in the SEQUENCE LISTING.

[0167] The amino acid sequence (504 amino acids) of the native Arachishypogaea HPPD (AhHPPD) is set forth as SEQ ID NO: 135 in the SEQUENCE LISTING; the AhHPPD-01 nucleotide sequence (1515 nucleotides) encoding the AhHPPD is set forth as SEQ ID NO: 136 in the SEQUENCE LISTING, and the AhHPPD-02 nucleotide sequence encoding the AhHPPD, which was obtained based on the Arabidopsisthaliana codon usage bias, is set forth as SEQ ID NO: 137 in the SEQUENCE LISTING. Position 372 of the AhHPPD amino acid sequence was mutated from the original phenylalanine to alanine to obtain a mutant AhHPPD (AhHPPDm-F372A) amino acid sequence as set forth in SEQ ID NO: 138 in the SEQUENCE LISTING. The mutant AhHPPD-01 (AhHPPDm-F372A-01) nucleotide sequence is set forth as SEQ ID NO: 139 in the SEQUENCE LISTING. The AhHPPDm-F372A-02 nucleotide sequence encoding the AhHPPDm-F372A, which was obtained based on the Arabidopsisthaliana codon usage bias, is set forth as SEQ ID NO: 140 in the SEQUENCE LISTING.

[0168] The amino acid sequence (339 amino acids) of the native Cyanobacteria HPPD (CyHPPD) is set forth as SEQ ID NO: 141 in the SEQUENCE LISTING; the CyHPPD-01 nucleotide sequence (1020 nucleotides) encoding the CyHPPD is set forth as SEQ ID NO: 142 in the SEQUENCE LISTING, and the CyHPPD-02 nucleotide sequence encoding the CyHPPD, which was obtained based on the Arabidopsisthaliana codon usage bias, is set forth as SEQ ID NO: 143 in the SEQUENCE LISTING. Position 372 of the CyHPPD amino acid sequence was mutated from the original phenylalanine to alanine to obtain a mutant CyHPPD (CyHPPDm-F372A) amino acid sequence as set forth in SEQ ID NO: 144 in the SEQUENCE LISTING. The mutant CyHPPD-01 (CyHPPDm-F372A-01) nucleotide sequence is set forth as SEQ ID NO: 145 in the SEQUENCE LISTING. The CyHPPDm-F372A-02 nucleotide sequence encoding the CyHPPDm-F372A, which was obtained based on the Arabidopsisthaliana codon usage bias, is set forth as SEQ ID NO: 146 in the SEQUENCE LISTING.

[0169] The amino acid sequence (350 amino acids) of the native Sphingobiumsp. N1 HPPD (N1HPPD) is set forth as SEQ ID NO: 147 in the SEQUENCE LISTING; the N1HPPD-01 nucleotide sequence (1053 nucleotides) encoding the N1HPPD is set forth as SEQ ID NO: 148 in the SEQUENCE LISTING, and the N1HPPD-02 nucleotide sequence encoding the N1HPPD, which was obtained based on the Arabidopsisthaliana codon usage bias, is set forth as SEQ ID NO: 149 in the SEQUENCE LISTING. Position 372 of the N1HPPD amino acid sequence was mutated from the original phenylalanine to alanine to obtain a mutant N1HPPD {N1HPPDm-F372A) amino acid sequence as set forth in SEQ ID NO: 150 in the SEQUENCE LISTING. The mutant N1HPPD-01 (N1HPPDm-F372A-01) nucleotide sequence is set forth as SEQ ID NO: 151 in the SEQUENCE LISTING. The N1HPPDm-F372A-02 nucleotide sequence encoding the N1HPPDm-F372A, which was obtained based on the Arabidopsisthaliana codon usage bias, is set forth as SEQ ID NO: 152 in the SEQUENCE LISTING.

[0170] The amino acid sequence (363 amino acids) of the native Sphingobiumsp. N2 HPPD (N2HPPD) is set forth as SEQ ID NO: 153 in the SEQUENCE LISTING; the N2HPPD-01 nucleotide sequence (1092 nucleotides) encoding the N2HPPD is set forth as SEQ ID NO: 154 in the SEQUENCE LISTING, and the N2HPPD-02 nucleotide sequence encoding the N2HPPD, which was obtained based on the Arabidopsisthaliana codon usage bias, is set forth as SEQ ID NO: 155 in the SEQUENCE LISTING. Position 372 of the N2HPPD amino acid sequence was mutated from the original phenylalanine to alanine to obtain a mutant N2HPPD (N2HPPDm-F372A) amino acid sequence as set forth in SEQ ID NO: 156 in the SEQUENCE LISTING. The mutant N2HPPD-01 (N2HPPDm-F372A-01) nucleotide sequence is set forth as SEQ ID NO: 157 in the SEQUENCE LISTING. The N2HPPDm-F372A-02 nucleotide sequence encoding the N2HPPDm-F372A, which was obtained based on the Arabidopsisthaliana codon usage bias, is set forth as SEQ ID NO: 158 in the SEQUENCE LISTING.

[0171] The amino acid sequence (365 amino acids) of the native Burkholderiasp. N3 HPPD (N3HPPD) is set forth as SEQ ID NO: 159 in the SEQUENCE LISTING; the N3HPPD-01 nucleotide sequence (1098 nucleotides) encoding the N3HPPD is set forth as SEQ ID NO: 160 in the SEQUENCE LISTING, and the N3HPPD-02 nucleotide sequence encoding the N3HPPD, which was obtained based on the Arabidopsisthaliana codon usage bias, is set forth as SEQ ID NO: 161 in the SEQUENCE LISTING. Position 372 of the N3HPPD amino acid sequence was mutated from the original phenylalanine to alanine to obtain a mutant N3HPPD (N3HPPDm-F372A) amino acid sequence as set forth in SEQ ID NO: 162 in the SEQUENCE LISTING. The mutant N3HPPD-01 (N3HPPDm-F372A-01) nucleotide sequence is set forth as SEQ ID NO: 163 in the SEQUENCE LISTING. The N3HPPDm-F372A-02 nucleotide sequence encoding the N3HPPDm-F372A, which was obtained based on the Arabidopsisthaliana codon usage bias, is set forth as SEQ ID NO: 164 in the SEQUENCE LISTING.

[0172] The amino acid sequence (365 amino acids) of the native Burkholderiasp. N4 HPPD (N4HPPD) is set forth as SEQ ID NO: 165 in the SEQUENCE LISTING; the N4HPPD-01 nucleotide sequence (1098 nucleotides) encoding the N4HPPD is set forth as SEQ ID NO: 166 in the SEQUENCE LISTING, and the N4HPPD-02 nucleotide sequence encoding the N4HPPD, which was obtained based on the Arabidopsisthaliana codon usage bias, is set forth as SEQ ID NO: 167 in the SEQUENCE LISTING. Position 372 of the N4HPPD amino acid sequence was mutated from the original phenylalanine to alanine to obtain a mutant N4HPPD (N411PPDm-F372A) amino acid sequence as set forth in SEQ ID NO: 168 in the SEQUENCE LISTING. The mutant N4HPPD-01 (N4HPPDm-F372A-01) nucleotide sequence is set forth as SEQ ID NO: 169 in the SEQUENCE LISTING. The N4HPPDm-F372A-02 nucleotide sequence encoding the N4HPPDm-F372A, which was obtained based on the Arabidopsisthaliana codon usage bias, is set forth as SEQ ID NO: 170 in the SEQUENCE LISTING.

[0173] The amino acid sequence (350 amino acids) of the native Sphingobiumsp. N5 HPPD (N5HPPD) is set forth as SEQ ID NO: 171 in the SEQUENCE LISTING; the N5HPPD-01 nucleotide sequence (1053 nucleotides) encoding the N5HPPD is set forth as SEQ ID NO: 172 in the SEQUENCE LISTING, and the N5HPPD-02 nucleotide sequence encoding the N5HPPD, which was obtained based on the Arabidopsisthaliana codon usage bias, is set forth as SEQ ID NO: 173 in the SEQUENCE LISTING. Position 372 of the N5HPPD amino acid sequence was mutated from the original phenylalanine to alanine to obtain a mutant N5HPPD (N5HPPDm-F372A) amino acid sequence as set forth in SEQ ID NO: 174 in the SEQUENCE LISTING. The mutant N5HPPD-01 (N5HPPDm-F372A-01) nucleotide sequence is set forth as SEQ ID NO: 175 in the SEQUENCE LISTING. TheN5HPPDm-F372A-02 nucleotide sequence encoding the N5HPPDm-F372A, which was obtained based on the Arabidopsisthaliana codon usage bias, is set forth as SEQ ID NO: 176 in the SEQUENCE LISTING.

### 2. Construction of Recombinant Expression Vectors Containing HPPDS from Different Species (F372A) for Arabidopsis Thaliana

[0174] According to the method of constructing the recombinant expression vector DBN11375 containing the AsHPPDm-F372A-02 nucleotide sequence as described above in point 3 of Example 1, the ZmHPPDm-F372A-02 nucleotide sequence, AtHPPDm-F372A nucleotide sequence, PfHPPDm-F372A-02 nucleotide sequence, GsHPPDm-F372A-02 nucleotide sequence, TaHPPDm-F372A-02 nucleotide sequence, BdHPPDm-F372A-02 nucleotide sequence, HvHPPDm-F372A-02 nucleotide sequence, SiHPPDm-F372A-02 nucleotide sequence, SbHPPDm-F372A-02 nucleotide sequence, OsHPPDm-F372A-02 nucleotide sequence, GmHPPDm-F372A-02 nucleotide sequence, CaHPPDm-F372A-02 nucleotide sequence, BnHPPDm-F372A-02 nucleotide sequence, HaHPPDm-F372A-02 nucleotide sequence, MsHPPDm-F372A-02 nucleotide sequence, BvHPPDm-F372A-02 nucleotide sequence, NtHPPDm-F372A-02 nucleotide sequence, CsHPPDm-F372A-02 nucleotide sequence, StHPPDm-F372A-02 nucleotide sequence, SlHPPDm-F372A-0 nucleotide sequence, AhHPPDm-F372A-02 nucleotide sequence, CyHPPDm-F372A-02 nucleotide sequence, N1HPPDm-F372A-02 nucleotide sequence, N2HPPDm-F372A-02 nucleotide sequence, N3HPPDm-F372A-02 nucleotide sequence, N4HPPDm-F372A-02 nucleotide sequence, and N5HPPDm-F372A-02 nucleotide sequence which were linked to the universal adapter primer 1 was respectively subjected to a recombination reaction with the linearized DBNBC-01 expression vector backbone to obtain the recombinant expression vectors DBN11376 to DBN11402 in sequence. Sequencing verified that the aforementioned nucleotide sequences were inserted correctly in the recombinant expression vectors DBN11376 to DBN11402.

[0175] According to the method of constructing the recombinant expression vector DBN11375 containing the AsHPPDm-F372A-02 nucleotide sequence as described above in point 3 of Example 1, the ZmHPPD-02 nucleotide sequence, AtHPPD nucleotide sequence, PfHPPD-02 nucleotide sequence, GsHPPD-02 nucleotide sequence, TaHPPD-02 nucleotide sequence, BdHPPD-02 nucleotide sequence, HvHPPD-02 nucleotide sequence, SiHPPD-02 nucleotide sequence, SbHPPD-02 nucleotide sequence, OsHPPD-02 nucleotide sequence, GmHPPD-02 nucleotide sequence, CaHPPD-02 nucleotide sequence, BnHPPD-02 nucleotide sequence, HaHPPD-02 nucleotide sequence, MsHPPD-02 nucleotide sequence, BvHPPD-02 nucleotide sequence, NtHPPD-02 nucleotide sequence, CsHPPD-02 nucleotide sequence, StHPPD-02 nucleotide sequence, S1HPPD-02 nucleotide sequence, AhHPPD-02 nucleotide sequence, CyHPPD-02 nucleotide sequence, N1HPPD-02 nucleotide sequence, N2HPPD-02 nucleotide sequence, N3HPPD-02 nucleotide sequence, N4HPPD-02 nucleotide sequence and N5HPPD-02 nucleotide sequence which were linked to the universal adapter primer 1 was respectively subjected to a recombination reaction with the linearized DBNBC-01 expression vector backbone to obtain the recombinant expression vectors DBN11376N to DBN11402N in sequence. Sequencing verified that the aforementioned nucleotide sequences were inserted correctly in the recombinant expression vectors DBN11376N to DBN11402N.

### 3. Transformation of Agrobacterium with the Recombinant Expression Vectors for Arabidopsis Thaliana

[0176] According to the method of transforming Agrobacterium with the recombinant expression vectors for Arabidopsisthaliana as described above in point 4 of Example 1, the recombinant expression vectors DBN11376 to DBN11402 and DBN11376N to DBN1 1402N which had been constructed correctly were transformed into Agrobacterium GV3101 respectively using a liquid nitrogen method. The results were verified by sequencing, showing that the structures of the recombinant expression vectors DBN11376 to DBN11402 and DBN11376N to DBN11402N were completely correct.

### 4. Detection of the Herbicide Tolerance of the Arabidopsis Thaliana Plants into which the HPPDs (F372A) from Different Species were Introduced

[0177] According to the method as described above in point 5 of Example 1, Arabidopsisthaliana inflorescences were immersed in the Agrobacterium solution as described in Example 3 so as to introduce the T-DNA in the recombinant expression vectors DBN11376 to DBN11402 and DBN11376N to DBN11402N constructed in Example 2 into the Arabidopsisthaliana chromosomes, thereby obtaining the corresponding transgenic Arabidopsisthaliana plants, i.e., Arabidopsisthaliana T₁ plants into which the ZmHPPDm-F372A-02 nucleotide sequence was introduced, Arabidopsisthaliana T₁ plants into which the AtHPPDm-F372A nucleotide sequence was introduced, Arabidopsisthaliana T₁ plants into which the PfHPPDm-F372A-02 nucleotide sequence was introduced, Arabidopsisthaliana T₁ plants into which the GsHPPDm-F372A-02 nucleotide sequence was introduced, Arabidopsisthaliana T₁ plants into which the TaHPPDm-F372A-02 nucleotide sequence was introduced, Arabidopsisthaliana T₁ plants into which the BdHPPDm-F372A-02 nucleotide sequence was introduced, Arabidopsisthaliana T₁ plants into which the HvHPPDm-F372A-02 nucleotide sequence was introduced, Arabidopsisthaliana T₁ plants into which the SiHPPDm-F372A-02 nucleotide sequence was introduced, Arabidopsisthaliana T₁ plants into which the SbHPPDm-F372A-02 nucleotide sequence was introduced, Arabidopsisthaliana T₁ plants into which the OsHPPDm-F372A-02 nucleotide sequence was introduced, Arabidopsisthaliana T₁ plants into which the GmHPPDm-F372A-02 nucleotide sequence was introduced, Arabidopsisthaliana T₁ plants into which the CaHPPDm-F372A-02 nucleotide sequence was introduced, Arabidopsisthaliana T₁ plants into which the BnHPPDm-F372A-02 nucleotide sequence was introduced, Arabidopsisthaliana T₁ plants into which the HaHPPDm-F372A-02 nucleotide sequence was introduced, Arabidopsisthaliana T₁ plants into which the MsHPPDm-F372A-02 nucleotide sequence was introduced, Arabidopsisthaliana T₁ plants into which the BvHPPDm-F372A-02 nucleotide sequence was introduced, Arabidopsisthaliana T₁ plants into which the NtHPPDm-F372A-02 nucleotide sequence was introduced, Arabidopsisthaliana T₁ plants into which the CsHPPDm-F372A-02 nucleotide sequence was introduced, Arabidopsisthaliana T₁ plants into which the StHPPDm-F372A-02 nucleotide sequence was introduced, Arabidopsisthaliana T₁ plants into which the S1HPPDm-F372A-02 nucleotide sequence was introduced, Arabidopsisthaliana T₁ plants into which the AhHPPDm-F372A-02 nucleotide sequence was introduced, Arabidopsisthaliana T₁ plants into which the CyHPPDm-F372A-02 nucleotide sequence was introduced, Arabidopsisthaliana T₁ plants into which the N1HPPDm-F372A-02 nucleotide sequence was introduced, Arabidopsisthaliana T₁ plants into which the N2HPPDm-F372A-02 nucleotide sequence was introduced, Arabidopsisthaliana T₁ plants into which the N3HPPDm-F372A-02 nucleotide sequence was introduced, Arabidopsisthaliana T₁ plants into which the N4HPPDm-F372A-02 nucleotide sequence was introduced, Arabidopsisthaliana T₁ plants into which the N5HPPDm-F372A-02 nucleotide sequence was introduced, Arabidopsisthaliana T₁ plants into which the ZmHPPD-02 nucleotide sequence was introduced, Arabidopsisthaliana T₁ plants into which the AtHPPD nucleotide sequence was introduced, Arabidopsisthaliana T₁ plants into which the PfHPPD-02 nucleotide sequence was introduced, Arabidopsisthaliana T₁ plants into which the GsHPPD-02 nucleotide sequence was introduced, Arabidopsisthaliana T₁ plants into which the TaHPPD-02 nucleotide sequence was introduced, Arabidopsisthaliana T₁ plants into which the BdHPPD-02 nucleotide sequence was introduced, Arabidopsisthaliana T₁ plants into which the HvHPPD-02 nucleotide sequence was introduced, Arabidopsisthaliana T₁ plants into which the SiHPPD-02 nucleotide sequence was introduced, Arabidopsisthaliana T₁ plants into which the SbHPPD-02 nucleotide sequence was introduced, Arabidopsisthaliana T₁ plants into which the OsHPPD-02 nucleotide sequence was introduced, Arabidopsisthaliana T₁ plants into which the GmHPPD-02 nucleotide sequence was introduced, Arabidopsisthaliana T₁ plants into which the CaHPPD-02 nucleotide sequence was introduced, Arabidopsisthaliana T₁ plants into which the BnHPPD-02 nucleotide sequence was introduced, Arabidopsisthaliana T₁ plants into which the HaHPPD-02 nucleotide sequence was introduced, Arabidopsisthaliana T₁ plants into which the MsHPPD-02 nucleotide sequence was introduced, Arabidopsisthaliana T₁ plants into which the BvHPPD-02 nucleotide sequence was introduced, Arabidopsisthaliana T₁ plants into which the NtHPPD-02 nucleotide sequence was introduced, Arabidopsisthaliana T₁ plants into which the CsHPPD-02 nucleotide sequence was introduced, Arabidopsisthaliana T₁ plants into which the StHPPD-02 nucleotide sequence was introduced, Arabidopsisthaliana T₁ plants into which the S1HPPD-02 nucleotide sequence was introduced, Arabidopsisthaliana T₁ plants into which the AhHPPD-02 nucleotide sequence was introduced, Arabidopsisthaliana T₁ plants into which the CyHPPD-02 nucleotide sequence was introduced, Arabidopsisthaliana T₁ plants into which the N1HPPD-02 nucleotide sequence was introduced, Arabidopsisthaliana T₁ plants into which the N2HPPD-02 nucleotide sequence was introduced, Arabidopsisthaliana T₁ plants into which the N3HPPD-02 nucleotide sequence was introduced, Arabidopsisthaliana T₁ plants into which the N4HPPD-02 nucleotide sequence was introduced, and Arabidopsisthaliana T₁ plants into which the N5HPPD-02 nucleotide sequence was introduced.

[0178] According to the method as described above in point 6 of Example 1, the aforementioned Arabidopsisthaliana T₁ plants and wild-type Arabidopsisthaliana plants (18 days after sowing) were sprayed with topramezone at three different concentrations respectively, i.e., 25 g ai/ha (one-fold field concentration, 1×), 100 g ai/ha (four-fold field concentration, 4×) and 0 g ai/ha(water, 0×) to detect the tolerance of Arabidopsisthaliana to the herbicide. The experimental results are shown in TABLE 2 and FIG. 4.

TABLE 2

Topramezone tolerance of Arabidopsis thaliana T₁ plants into which HPPDs (F372A) from different species were introduced

| Source of the gene | Arabidopsis thaliana genotypes | Concentration (g ai/ha) | Classification and statistics of pesticide damage grade | | | | Scores | Resistance evaluation |
|---|---|---|---|---|---|---|---|---|
| | | | Grade 0 | Grade 1 | Grade 2 | Grade 3 | | |
| | Wild type Arabidopsis thaliana | 0 | 16 | 0 | 0 | 0 | 0 | |
| | | 25 | 0 | 0 | 0 | 16 | 100 | non-resistant |
| | | 100 | 0 | 0 | 0 | 16 | 100 | non-resistant |
| Zea mays | ZmHPPD-02 | 0 | 16 | 0 | 0 | 0 | 0 | |
| | | 25 | 0 | 0 | 0 | 16 | 100 | non-resistant |
| | | 100 | 0 | 0 | 0 | 16 | 100 | non-resistant |
| | ZmHPPDm-F372A-02 | 0 | 16 | 0 | 0 | 0 | 0 | |
| | | 25 | 16 | 0 | 0 | 0 | 0 | highly resistant |
| | | 100 | 4 | 12 | 0 | 0 | 25 | moderately resistant |
| Triticum aestivum | TaHPPD-02 | 0 | 16 | 0 | 0 | 0 | 0 | |
| | | 25 | 0 | 0 | 0 | 16 | 100 | non-resistant |
| | | 100 | 0 | 0 | 0 | 16 | 100 | non-resistant |
| | TaHPPDm-F372A-02 | 0 | 16 | 0 | 0 | 0 | 0 | |
| | | 25 | 16 | 0 | 0 | 0 | 0 | highly resistant |
| | | 100 | 15 | 1 | 0 | 0 | 2 | highly resistant |
| Brachypodium distachyon | BdHPPD-02 | 0 | 16 | 0 | 0 | 0 | 0 | |
| | | 25 | 0 | 0 | 0 | 16 | 100 | non-resistant |
| | | 100 | 0 | 0 | 0 | 16 | 100 | non-resistant |
| | BdHPPDm-F372A-02 | 0 | 16 | 0 | 0 | 0 | 0 | |
| | | 25 | 16 | 0 | 0 | 0 | 0 | highly resistant |
| | | 100 | 6 | 10 | 0 | 0 | 21 | moderately resistant |
| Hordeum vulgare | HvHPPD-02 | 0 | 16 | 0 | 0 | 0 | 0 | |
| | | 25 | 0 | 0 | 0 | 16 | 100 | non-resistant |
| | | 100 | 0 | 0 | 0 | 16 | 100 | non-resistant |
| | HvHPPDm-F372A-02 | 0 | 16 | 0 | 0 | 0 | 0 | |
| | | 25 | 15 | 1 | 0 | 0 | 2 | highly resistant |
| | | 100 | 8 | 8 | 0 | 0 | 17 | moderately resistant |
| Setaria ilalica | SiHPPD-02 | 0 | 16 | 0 | 0 | 0 | 0 | |
| | | 25 | 0 | 0 | 0 | 16 | 100 | non-resistant |
| | | 100 | 0 | 0 | 0 | 16 | 100 | non-resistant |
| | SiHPPDm-F372A-02 | 0 | 16 | 0 | 0 | 0 | 0 | |
| | | 25 | 13 | 2 | 1 | 0 | 8 | highly resistant |
| | | 100 | 6 | 8 | 2 | 0 | 25 | moderately resistant |
| Sorghum bicolor | SbHPPD-02 | 0 | 16 | 0 | 0 | 0 | 0 | |
| | | 25 | 0 | 0 | 0 | 16 | 100 | non-resistant |
| | | 100 | 0 | 0 | 0 | 16 | 100 | non-resistant |
| | SbHPPDm-F372A-02 | 0 | 16 | 0 | 0 | 0 | 0 | |
| | | 25 | 16 | 0 | 0 | 0 | 0 | highly resistant_ |
| | | 100 | 4 | 4 | 8 | 0 | 42 | poorly resistant |
| Oryza saliva | OsHPPD-02 | 0 | 16 | 0 | 0 | 0 | 0 | |
| | | 25 | 0 | 0 | 0 | 16 | 100 | non-resistant |
| | | 100 | 0 | 0 | 0 | 16 | 100 | non-resistant |
| | OsHPPDm-F372A-02 | 0 | 16 | 0 | 0 | 0 | 0 | |
| | | 25 | 8 | 8 | 0 | 0 | 17 | moderately resistant |
| | | 100 | 0 | 0 | 0 | 16 | 100 | non-resistant |
| Arabidopsis thaliana | AtHPPD | 0 | 16 | 0 | 0 | 0 | 0 | |
| | | 25 | 0 | 0 | 0 | 16 | 100 | non-resistant |
| | | 100 | 0 | 0 | 0 | 16 | 100 | non-resistant |
| | AtHPPDm-F372A | 0 | 16 | 0 | 0 | 0 | 0 | |
| | | 25 | 4 | 4 | 8 | 0 | 42 | poorly resistant |
| | | 100 | 0 | 0 | 4 | 12 | 92 | non-resistant |
| Gossypium hirsutum | GsHPPD-02 | 0 | 16 | 0 | 0 | 0 | 0 | |
| | | 25 | 0 | 0 | 0 | 16 | 100 | non-resistant |
| | | 100 | 0 | 0 | 0 | 16 | 100 | non-resistant |
| | GsHPPDm-F372A-02 | 0 | 16 | 0 | 0 | 0 | 0 | |
| | | 25 | 16 | 0 | 0 | 0 | 0 | highly resistant |
| | | 100 | 0 | 0 | 0 | 16 | 100 | non-resistant |
| Glycine max | GmHPPD-02 | 0 | 16 | 0 | 0 | 0 | 0 | |
| | | 25 | 0 | 0 | 0 | 16 | 100 | non-resistant |
| | | 100 | 0 | 0 | 0 | 16 | 100 | non-resistant |
| | GmHPPDm-F372A-02 | 0 | 16 | 0 | 0 | 0 | 0 | |
| | | 25 | 0 | 12 | 4 | 0 | 42 | poorly resistant |
| | | 100 | 0 | 0 | 0 | 16 | 100 | non-resistant |
| Cicer arietinum | CaHPPD-02 | 0 | 16 | 0 | 0 | 0 | 0 | |
| | | 25 | 0 | 0 | 0 | 16 | 100 | non-resistant |
| | | 100 | 0 | 0 | 0 | 16 | 100 | non-resistant |
| | CaHPPD-F372A-02 | 0 | 16 | 0 | 0 | 0 | 0 | |
| | | 25 | 0 | 13 | 3 | 0 | 40 | poorly resistant |
| | | 100 | 0 | 0 | 0 | 16 | 100 | non-resistant |
| Brassica napus | BnHPPD-02 | 0 | 16 | 0 | 0 | 0 | 0 | |
| | | 25 | 0 | 0 | 0 | 16 | 100 | non-resistant |
| | | 100 | 0 | 0 | 0 | 16 | 100 | non-resistant |
| | BnHPPDm-F372A-02 | 0 | 16 | 0 | 0 | 0 | 0 | |
| | | 25 | 0 | 4 | 12 | 0 | 58 | poorly resistant |
| | | 100 | 0 | 0 | 0 | 16 | 100 | non-resistant |
| Helianthus annuus | HaHPPD-02 | 0 | 16 | 0 | 0 | 0 | 0 | |
| | | 25 | 0 | 0 | 0 | 16 | 100 | non-resistant |
| | | 100 | 0 | 0 | 0 | 16 | 100 | non-resistant |
| | HaHPPDm-F372A-02 | 0 | 16 | 0 | 0 | 0 | 0 | |
| | | 25 | 0 | 8 | 8 | 0 | 50 | poorly resistant |
| | | 100 | 0 | 2 | 12 | 2 | 67 | poorly resistant |
| Medicago saliva | MsHPPD-02 | 0 | 16 | 0 | 0 | 0 | 0 | |
| | | 25 | 0 | 0 | 0 | 16 | 100 | non-resistant |
| | | 100 | 0 | 0 | 0 | 16 | 100 | non-resistant |
| | MsHPPDm-F372A-02 | 0 | 16 | 0 | 0 | 0 | 0 | |
| | | 25 | 5 | 7 | 4 | 0 | 31 | moderately resistant |
| | | 100 | 0 | 4 | 9 | 3 | 65 | poorly resistant |
| Beta vulgaris | BvHPPD-02 | 0 | 16 | 0 | 0 | 0 | 0 | |
| | | 25 | 0 | 0 | 0 | 16 | 100 | non-resistant |
| | | 100 | 0 | 0 | 0 | 16 | 100 | non-resistant |
| | BvHPPDm-F372A-02 | 0 | 16 | 0 | 0 | 0 | 0 | |
| | | 25 | 0 | 6 | 10 | 0 | 54 | poorly resistant |
| | | 100 | 0 | 0 | 4 | 12 | 92 | non-resistant |
| Nicotiana tabacum | NtHPPD-02 | 0 | 16 | 0 | 0 | 0 | 0 | |
| | | 25 | 0 | 0 | 0 | 16 | 100 | non-resistant |
| | | 100 | 0 | 0 | 0 | 16 | 100 | non-resistant |
| | NtHPPDm-F372A-02 | 0 | 16 | 0 | 0 | 0 | 0 | |
| | | 25 | 0 | 6 | 10 | 0 | 54 | poorly resistant |
| | | 100 | 0 | 0 | 0 | 16 | 100 | non-resistant |
| Cucumis sativus | CsHPPD-02 | 0 | 16 | 0 | 0 | 0 | 0 | |
| | | 25 | 0 | 0 | 0 | 16 | 100 | non-resistant |
| | | 100 | 0 | 0 | 0 | 16 | 100 | non-resistant |
| | CsHPPDm-F372A-02 | 0 | 16 | 0 | 0 | 0 | 0 | |
| | | 25 | 0 | 0 | 16 | 0 | 67 | poorly resistant |
| | | 100 | 0 | 0 | 0 | 16 | 100 | non-resistant |
| Solanum tuberosum | StHPPD-02 | 0 | 16 | 0 | 0 | 0 | 0 | |
| | | 25 | 0 | 0 | 0 | 16 | 100 | non-resistant |
| | | 100 | 0 | 0 | 0 | 16 | 100 | non-resistant |
| | StHPPDm-F372A-02 | 0 | 16 | 0 | 0 | 0 | 0 | |
| | | 25 | 4 | 12 | 0 | 0 | 25 | moderately resistant |
| | | 100 | 0 | 1 | 4 | 11 | 88 | non-resistant |
| Solanum lycopersicum | S1HPPD-02 | 0 | 16 | 0 | 0 | 0 | 0 | |
| | | 25 | 0 | 0 | 0 | 16 | 100 | non-resistant |
| | | 100 | 0 | 0 | 0 | 16 | 100 | non-resistant |
| | S1HPPDm-F372A-02 | 0 | 16 | 0 | 0 | 0 | 0 | |
| | | 25 | 1 | 1 | 14 | 0 | 60 | poorly resistant |
| | | 100 | 0 | 1 | 4 | 11 | 88 | non-resistant |
| Arachis hypogaea | AhHPPD-02 | 0 | 16 | 0 | 0 | 0 | 0 | |
| | | 25 | 0 | 0 | 0 | 16 | 100 | non-resistant |
| | | 100 | 0 | 0 | 0 | 16 | 100 | non-resistant |
| | AhHPPDm-F372A-02 | 0 | 16 | 0 | 0 | 0 | 0 | |
| | | 25 | 2 | 12 | 2 | 0 | 33 | moderately resistant |
| | | 100 | 0 | 0 | 10 | 6 | 79 | non-resistant |
| Pseudomonas fluorescens | PfHPPD-02 | 0 | 16 | 0 | 0 | 0 | 0 | |
| | | 25 | 0 | 0 | 0 | 16 | 100 | non-resistant |
| | | 100 | 0 | 0 | 0 | 16 | 100 | non-resistant |
| | PfHPPDm-F372A-02 | 0 | 16 | 0 | 0 | 0 | 0 | |
| | | 25 | 16 | 0 | 0 | 0 | 0 | highly resistant |
| | | 100 | 12 | 4 | 0 | 0 | 8 | highly resistant |
| Cyanobacteria | CyHPPD-02 | 0 | 16 | 0 | 0 | 0 | 0 | |
| | | 25 | 0 | 0 | 0 | 0 | 16 | non-resistant |
| | | 100 | 0 | 0 | 0 | 0 | 16 | non-resistant |
| | CyHPPDm-F372A-02 | 0 | 16 | 0 | 0 | 0 | 0 | |
| | | 25 | 1 | 14 | 1 | 0 | 33 | moderately resistant |
| | | 100 | 0 | 1 | 15 | 0 | 65 | poorly resistant |
| N1 | N1HPPD-02 | 0 | 16 | 0 | 0 | 0 | 0 | |
| | | 25 | 2 | 12 | 1 | 1 | 35 | poorly resistant |
| | | 100 | 0 | 4 | 8 | 4 | 67 | poorly resistant |
| | N1HPPDm-F372A-02 | 0 | 16 | 0 | 0 | 0 | 0 | |
| | | 25 | 16 | 0 | 0 | 0 | 0 | highly resistant |
| | | 100 | 16 | 0 | 0 | 0 | 0 | highly resistant |
| N2 | N2HPPD-02 | 0 | 16 | 0 | 0 | 0 | 0 | |
| | | 25 | 0 | 1 | 15 | 0 | 65 | poorly resistant |
| | | 100 | 0 | 0 | 0 | 16 | 100 | non-resistant |
| | N2HPPDm-F372A-02 | 0 | 16 | 0 | 0 | 0 | 0 | |
| | | 25 | 16 | 0 | 0 | 0 | 0 | highly resistant |
| | | 100 | 16 | 0 | 0 | 0 | 0 | highly resistant |
| N3 | N3HPPD-02 | 0 | 16 | 0 | 0 | 0 | 0 | |
| | | 25 | 0 | 6 | 8 | 2 | 58 | poorly resistant |
| | | 100 | 0 | 0 | 0 | 16 | 100 | non-resistant |
| | N3HPPDm-F372A-02 | 0 | 16 | 0 | 0 | 0 | 0 | |
| | | 25 | 16 | 0 | 0 | 0 | 0 | highly resistant |
| | | 100 | 12 | 4 | 0 | 0 | 8 | highly resistant |
| N4 | N4HPPD-02 | 0 | 16 | 0 | 0 | 0 | 0 | |
| | | 25 | 5 | 6 | 5 | 0 | 33 | moderately resistant |
| | | 100 | 0 | 8 | 2 | 6 | 63 | poorly resistant |
| | N4HPPDm-F372A-02 | 0 | 16 | 0 | 0 | 0 | 0 | |
| | | 25 | 16 | 0 | 0 | 0 | 0 | highly resistant |
| | | 100 | 12 | 4 | 0 | 0 | 8 | highly resistant |
| N5 | N5HPPD-02 | 0 | 16 | 0 | 0 | 0 | 0 | |
| | | 25 | 6 | 6 | 4 | 0 | 21 | moderately resistant |
| | | 100 | 0 | 7 | 5 | 4 | 60 | poorly resistant |
| | N5HPPDm-F372A-02 | 0 | 16 | 0 | 0 | 0 | 0 | |
| | | 25 | 16 | 0 | 0 | 0 | 0 | highly resistant |
| | | 100 | 13 | 3 | 0 | 0 | 6 | highly resistant |

[0179] The results of TABLE 2 and FIG. 4 show that compared with the Arabidopsisthaliana plants into which unmutated HPPD genes were introduced, all the Arabidopsisthaliana plants into which HPPD genes with a mutation at position 372 from different species were introduced had different degrees of tolerance to topramezone, and in particular the Arabidopsisthaliana plants into which HPPD genes with a mutation at position 372 from microorganisms had relatively superior tolerance to topramezone, while the wild-type Arabidopsisthaliana plants had no tolerance to topramezone. Thus, it can be seen that position 372 is the key position of HPPDs. Mutation of position 372 (F372A) of amino acid sequences of HPPDs from different species can impart tolerance to topramezone upon plants.

### Example 3: Mutation of Position 372 of Amino Acid Sequences of HPPDs From Different Ecotypes Within the Same Species (F372A) and Verification of the Mutation Effect

[0180] In order to verify the effect of mutation of position 372 of the amino acid sequence of HPPDs from different ecotypes within the same species, position 372 of HPPDs from different ecotypes of Triticumaestivum (F372A) was mutated to verify the mutation effect thereof.

### 1. Acquisition of HPPDs from Different Ecotypes of Triticum Aestivum and Mutant HPPDs (F372A)

[0181] The amino acid sequence (471 amino acids) of the native HPPD of Triticumaestivum ecotype 1 with the UniProt Accession Number A0A3B5YS13 (TaHPPDl) is set forth as SEQ ID NO: 177 in the SEQUENCE LISTING; the TaHPPD1-01 nucleotide sequence (1416 nucleotides) encoding the TaHPPD1 is set forth as SEQ ID NO: 178 in the SEQUENCE LISTING, and the TaHPPD1.02 nucleotide sequence encoding the TaHPPD1, which was obtained based on the Arabidopsisthaliana codon usage bias, is set forth as SEQ ID NO: 179 in the SEQUENCE LISTING. Position 372 of the TaHPPD1 amino acid sequence was mutated from the original phenylalanine to alanine to obtain a mutant TaHPPD1 (TaHPPD1m-F372A) amino acid sequence as set forth in SEQ ID NO: 180 in the SEQUENCE LISTING. The mutant TaHPPD1-01 (TaHPPD1m-F372A-01) nucleotide sequence is set forth as SEQ ID NO: 181 in the SEQUENCE LISTING. The TaHPPD1m-F372A-02 nucleotide sequence encoding the TaHPPD1m-F372A, which was obtained based on the Arabidopsisthaliana codon usage bias, is set forth as SEQ ID NO: 182 in the SEQUENCE LISTING.

[0182] The amino acid sequence (436 amino acids) of the native HPPD of Triticumaestivum ecotype 2 with the UniProt Accession Number Q45FE8 (TaHPPD2) is set forth as SEQ ID NO: 183 in the SEQUENCE LISTING; the TaHPPD2-01 nucleotide sequence (1311 nucleotides) encoding the TaHPPD2 is set forth as SEQ ID NO: 184 in the SEQUENCE LISTING, and the TaHPPD2-02 nucleotide sequence encoding the TaHPPD2, which was obtained based on the Arabidopsisthaliana codon usage bias, is set forth as SEQ ID NO: 185 in the SEQUENCE LISTING. Position 372 of the TaHPPD2 amino acid sequence was mutated from the original phenylalanine to alanine to obtain a mutant TaHPPD2 (TaHPPD2m-F372A) amino acid sequence as set forth in SEQ ID NO: 186 in the SEQUENCE LISTING. The mutant TaHPPD2-01 (TaHPPD2m-F372A-01) nucleotide sequence is set forth as SEQ ID NO: 187 in the SEQUENCE LISTING. The TaHPPD2m-F372A-02 nucleotide sequence encoding the TaHPPD2m-F372A, which was obtained based on the Arabidopsisthaliana codon usage bias, is set forth as SEQ ID NO: 188 in the SEQUENCE LISTING.

[0183] The amino acid sequence (436 amino acids) of the native HPPD of Triticumaestivum ecotype 3 with the UniProt Accession Number A0A3B6PKV0 (TaHPPD3) is set forth as SEQ ID NO: 189 in the SEQUENCE LISTING; the TaHPPD3-01 nucleotide sequence (1311 nucleotides) encoding the TaHPPD3 is set forth as SEQ ID NO: 190 in the SEQUENCE LISTING, and the TaHPPD3-02 nucleotide sequence encoding the TaHPPD3, which was obtained based on the Arabidopsisthaliana codon usage bias, is set forth as SEQ ID NO: 191 in the SEQUENCE LISTING. Position 372 of the TaHPPD3 amino acid sequence was mutated from the original phenylalanine to alanine to obtain a mutant TaHPPD3 (TaHPPD3m-F372A) amino acid sequence as set forth in SEQ ID NO: 192 in the SEQUENCE LISTING. The mutant TaHPPD3-01 (TaHPPD3m-F372A-01) nucleotide sequence is set forth as SEQ ID NO: 193 in the SEQUENCE LISTING. The TaHPPD3m-F372A-02 nucleotide sequence encoding the TaHPPD3m-F372A, which was obtained based on the Arabidopsisthaliana codon usage bias, is set forth as SEQ ID NO: 194 in the SEQUENCE LISTING.

[0184] The amino acid sequence (433 amino acids) of the native HPPD of Triticumaestivum ecotype 4 with the UniProt Accession Number A0A3B6NLC6 (TaHPPD4) is set forth as SEQ ID NO: 195 in the SEQUENCE LISTING; the TaHPPD4-01 nucleotide sequence (1302 nucleotides) encoding the TaHPPD4 is set forth as SEQ ID NO: 196 in the SEQUENCE LISTING, and the TaHPPD4-02 nucleotide sequence encoding the TaHPPD4, which was obtained based on the Arabidopsisthaliana codon usage bias, is set forth as SEQ ID NO: 197 in the SEQUENCE LISTING. Position 372 of the TaHPPD4 amino acid sequence was mutated from the original phenylalanine to alanine to obtain a mutant TaHPPD4 (TaHPPD4m-F372A) amino acid sequence as set forth in SEQ ID NO: 198 in the SEQUENCE LISTING. The mutant TaHPPD4-01 (TaHPPD4m-F372A-01) nucleotide sequence is set forth as SEQ ID NO: 199 in the SEQUENCE LISTING. The TaHPPD4m-F372A-02 nucleotide sequence encoding the TaHPPD4m-F372A, which was obtained based on the Arabidopsisthaliana codon usage bias, is set forth as SEQ ID NO: 200 in the SEQUENCE LISTING.

[0185] The amino acid sequence (413 amino acids) of the native HPPD of Triticumaestivum ecotype 5 with the UniProt Accession Number A0A3B6NNK0 (TaHPPD5) is set forth as SEQ ID NO: 201 in the SEQUENCE LISTING; the TaHPPD5-01 nucleotide sequence (1242 nucleotides) encoding the TaHPPD5 is set forth as SEQ ID NO: 202 in the SEQUENCE LISTING, and the TaHPPD5-02 nucleotide sequence encoding the TaHPPD5, which was obtained based on the Arabidopsisthaliana codon usage bias, is set forth as SEQ ID NO: 203 in the SEQUENCE LISTING. Position 372 of the TaHPPD5 amino acid sequence was mutated from the original phenylalanine to alanine to obtain a mutant TaHPPD5 (TaHPPD5m-F372A) amino acid sequence as set forth in SEQ ID NO: 204 in the SEQUENCE LISTING. The mutant TaHPPD5-01 (TaHPPD5m-F372A-01) nucleotide sequence is set forth as SEQ ID NO: 205 in the SEQUENCE LISTING. The TaHPPD5m-F372A-02 nucleotide sequence encoding the TaHPPD5m-F372A, which was obtained based on the Arabidopsisthaliana codon usage bias, is set forth as SEQ ID NO: 206 in the SEQUENCE LISTING.

[0186] The amino acid sequence (403 amino acids) of the native HPPD of Triticumaestivum ecotype 6 with the UniProt Accession Number A0A3B5YPS5 (TaHPPD6) is set forth as SEQ ID NO: 207 in the SEQUENCE LISTING; the TaHPPD6-01 nucleotide sequence (1212 nucleotides) encoding the TaHPPD6 is set forth as SEQ ID NO: 208 in the SEQUENCE LISTING, and the TaHPPD6-02 nucleotide sequence encoding the TaHPPD6, which was obtained based on the Arabidopsisthaliana codon usage bias, is set forth as SEQ ID NO: 209 in the SEQUENCE LISTING. Position 372 of the TaHPPD6 amino acid sequence was mutated from the original phenylalanine to alanine to obtain a mutant TaHPPD6 (TaHPPD6m-F372A) amino acid sequence as set forth in SEQ ID NO: 210 in the SEQUENCE LISTING. The mutant TaHPPD6-01 (TaHPPD6m-F372A-01) nucleotide sequence is set forth as SEQ ID NO: 211 in the SEQUENCE LISTING. The TaHPPD6m-F372A-02 nucleotide sequence encoding the TaHPPD6m-F372A, which was obtained based on the Arabidopsisthaliana codon usage bias, is set forth as SEQ ID NO: 212 in the SEQUENCE LISTING.

[0187] The amino acid sequence (381 amino acids) of the native HPPD of Triticumaestivum ecotype 7 with the UniProt Accession Number A7WK82 (TaHPPD7) is set forth as SEQ ID NO: 213 in the SEQUENCE LISTING; the TaHPPD7-01 nucleotide sequence (1146 nucleotides) encoding the TaHPPD7 is set forth as SEQ ID NO: 214 in the SEQUENCE LISTING, and the TaHPPD7-02 nucleotide sequence encoding the TaHPPD7, which was obtained based on the Arabidopsis thaliana codon usage bias, is set forth as SEQ ID NO: 215 in the SEQUENCE LISTING. Position 372 of the TaHPPD7 amino acid sequence was mutated from the original phenylalanine to alanine to obtain a mutant TaHPPD7 (TaHPPD7m-F372A) amino acid sequence as set forth in SEQ ID NO: 216 in the SEQUENCE LISTING. The mutant TaHPPD7-01 (TaHPPD7m-F372A-01) nucleotide sequence is set forth as SEQ ID NO: 217 in the SEQUENCE LISTING. The TaHPPD7m-F372A-02 nucleotide sequence encoding the TaHPPD7m-F372A, which was obtained based on the Arabidopsisthaliana codon usage bias, is set forth as SEQ ID NO: 218 in the SEQUENCE LISTING.

### 2. Construction of Recombinant Expression Vectors Containing HPPDs from Different Ecotypes of Triticum Aestivum (F372A) for Arabidopsis Thaliana

[0188] According to the method of constructing the recombinant expression vector DBN11375 containing the AsHPPDm-F372A-02 nucleotide sequence as described above in point 3 of Example 1, the TaHPPD1m-F372A-02 nucleotide sequence, TaHPPD2m-F372A-02 nucleotide sequence, TaHPPD3m-F372A-02 nucleotide sequence, TaHPPD4m-F372A-02 nucleotide sequence, TaHPPD5m-F372A-02 nucleotide sequence, TaHPPD6m-F372A-02 nucleotide sequence and TaHPPD7m-F372A-02 nucleotide sequence which were linked to the universal adapter primer 1 was respectively subjected to a recombination reaction with the linearized DBNBC-01 expression vector backbone to obtain the recombinant expression vectors DBN11403 to DBN11409 in sequence. Sequencing verified that the aforementioned nucleotide sequences were inserted correctly in the recombinant expression vectors DBN11403 to DBN11409.

[0189] According to the method of constructing the recombinant expression vector DBN11375 containing the AsHPPDm-F372A-02 nucleotide sequence as described above in point 3 of Example 1, the TaHPPD1-02 nucleotide sequence, TaHPPD2-02 nucleotide sequence, TaHPPD3-02 sequence, TaHPPD4-02 nucleotide sequence, TaHPPD5-02 nucleotide sequence, TaHPPD6-02 nucleotide sequence and TaHPPD7-02 nucleotide sequence which were linked to the universal adapter primer 1 was respectively subjected to a recombination reaction with the linearized DBNBC-01 expression vector backbone to obtain the recombinant expression vectors DBN11403N to DBN11409N in sequence. Sequencing verified that the aforementioned nucleotide sequences were inserted correctly in the recombinant expression vectors DBN11403N to DBN 11409N.

### 3. Transformation of Agrobacterium with the Recombinant Expression Vectors for Arabidopsis Thaliana

[0190] According to the method of transforming Agrobacterium with the recombinant expression vectors for Arabidopsisthaliana as described above in point 4 of Example 1, the recombinant expression vectors DBN11403 to DBN11409 and DBN11403N to DBN1 1409N which had been constructed correctly were transformed into Agrobacterium GV3101 respectively using a liquid nitrogen method. The results were verified by sequencing, showing that the structures of the recombinant expression vectors DBN11403 to DBN11409 and DBN11403N to DBN11409N were completely correct.

### 4. Detection of the Herbicide Tolerance of the Arabidopsis Thaliana Plants into Which HPPDs from Different Ecotypes of Triticum Aestivum (F372A) Were Introduced

[0191] According to the method as described above in point 5 of Example 1, Arabidopsisthaliana inflorescences were immersed in the Agrobacterium solution as described in Example 3 so as to introduce the T-DNA in the recombinant expression vectors DBN11403 to DBN11409 and DBN11403N to DBN11409N constructed in Example 2 into the Arabidopsisthaliana chromosomes, thereby obtaining the corresponding transgenic Arabidopsisthaliana plants, i.e., Arabidopsisthaliana T₁ plants into which the TaHPPD1m-F372A-02 nucleotide sequence was introduced, Arabidopsisthaliana T₁ plants into which the TaHPPD2m-F372A-02 nucleotide sequence was introduced, Arabidopsisthaliana T₁ plants into which the TaHPPD3m-F372A-02 nucleotide sequence was introduced, Arabidopsisthaliana T₁ plants into which the TaHPPD4m-F372A-02 nucleotide sequence was introduced, Arabidopsisthaliana T₁ plants into which the TaHPPD5m-F372A-02 nucleotide sequence was introduced, Arabidopsisthaliana T₁ plants into which the TaHPPD6m-F372A-02 nucleotide sequence was introduced, Arabidopsisthaliana T₁ plants into which the TaHPPD7m-F372A-02 nucleotide sequence was introduced, and Arabidopsisthaliana T₁ plants into which the TaHPPD1-02 nucleotide sequence was introduced, Arabidopsisthaliana T₁ plants into which the TaHPPD2-02 nucleotide sequence was introduced, Arabidopsisthaliana T₁ plants into which the TaHPPD3-02 nucleotide sequence was introduced, Arabidopsisthaliana T₁ plants into which the TaHPPD4-02 nucleotide sequence was introduced, Arabidopsisthaliana T₁ plants into which the TaHPPD5-02 nucleotide sequence was introduced, Arabidopsisthaliana T₁ plants into which the TaHPPD6-02 nucleotide sequence was introduced and Arabidopsisthaliana T₁ plants into which the TaHPPD7-02 nucleotide sequence was introduced.

[0192] According to the method as described above in point 6 of Example 1, the aforementioned Arabidopsisthaliana T₁ plants and wild-type Arabidopsisthaliana plants (18 days after sowing) were sprayed with topramezone at three different concentrations respectively, i.e., 25 g ai/ha (one-fold field concentration, 1x), 100 g ai/ha (four-fold field concentration, 4x) and 0 g ai/ha (water, 0x) to detect the tolerance of Arabidopsisthaliana to the herbicide. The experimental results are shown in TABLE 3.

TABLE 3

Topramezone tolerance of Arabidopsis thaliana T₁ plants into which HPPDs from different ecotypes of Triticum aestivum (F372A) were introduced

| Source of the gene | Arabidopsis thaliana genotypes | Concentration (g ai/ha) | Classification and statistics of pesticide damage grade | | | | Scores | Resistance evaluation |
|---|---|---|---|---|---|---|---|---|
| | | | Grade 0 | Grade 1 | Grade 2 | Grade 3 | | |
| | Wild-type Arabidopsis thaliana | 0 | 16 | 0 | 0 | 0 | 0 | |
| | | 25 | 0 | 0 | 0 | 16 | 100 | non-resistant |
| | | 100 | 0 | 0 | 0 | 16 | 100 | non-resistant |
| Ecotype 1 | TaHPPD 1-02 | 0 | 16 | 0 | 0 | 0 | 0 | |
| | | 25 | 0 | 0 | 0 | 16 | 100 | non-resistant |
| | | 100 | 0 | 0 | 0 | 16 | 100 | non-resistant |
| | TaHPPD1m-F372A-02 | 0 | 16 | 0 | 0 | 0 | 0 | |
| | | 25 | 16 | 0 | 0 | 0 | 0 | highly resistant |
| | | 100 | 15 | 1 | 0 | 0 | 2 | highly resistant |
| Ecotype 2 | TaHPPD2-02 | 0 | 16 | 0 | 0 | 0 | 0 | |
| | | 25 | 0 | 0 | 0 | 16 | 100 | non-resistant |
| | | 100 | 0 | 0 | 0 | 16 | 100 | non-resistant |
| | TaHPPD2m-F372A-02 | 0 | 16 | 0 | 0 | 0 | 0 | |
| | | 25 | 16 | 0 | 0 | 0 | 0 | highly resistant |
| | | 100 | 8 | 8 | 0 | 0 | 17 | moderately resistant |
| Ecotype 3 | TaHPPD3-02 | 0 | 16 | 0 | 0 | 0 | 0 | |
| | | 25 | 0 | 0 | 0 | 16 | 100 | non-resistant |
| | | 100 | 0 | 0 | 0 | 16 | 100 | non-resistant |
| | TaHPPD3m-F372A-02 | 0 | 16 | 0 | 0 | 0 | 0 | |
| | | 25 | 16 | 0 | 0 | 0 | 0 | highly resistant |
| | | 100 | 12 | 4 | 0 | 0 | 8 | highly resistant |
| Ecotype 4 | TaHPPD4-02 | 0 | 16 | 0 | 0 | 0 | 0 | |
| | | 25 | 0 | 0 | 4 | 12 | 92 | non-resistant |
| | | 100 | 0 | 0 | 0 | 16 | 100 | non-resistant |
| | TaHPPD4m-F372A-02 | 0 | 16 | 0 | 0 | 0 | 0 | |
| | | 25 | 16 | 0 | 0 | 0 | 0 | highly resistant |
| | | 100 | 11 | 5 | 0 | 0 | 10 | highly resistant |
| Ecotype 5 | TaHPPD5-02 | 0 | 16 | 0 | 0 | 0 | 0 | |
| | | 25 | 0 | 0 | 8 | 8 | 83 | non-resistant |
| | | 100 | 0 | 0 | 2 | 14 | 96 | non-resistant |
| | TaHPPD5m-F372A-02 | 0 | 16 | 0 | 0 | 0 | 0 | |
| | | 25 | 16 | 0 | 0 | 0 | 0 | highly resistant |
| | | 100 | 6 | 9 | 1 | 0 | 23 | moderately resistant |
| Ecotype 6 | TaHPPD6-02 | 0 | 16 | 0 | 0 | 0 | 0 | |
| | | 25 | 0 | 0 | 6 | 10 | 88 | non-resistant |
| | | 100 | 0 | 0 | 2 | 14 | 96 | non-resistant |
| | TaHPPD6m-F372A-02 | 0 | 16 | 0 | 0 | 0 | 0 | |
| | | 25 | 16 | 0 | 0 | 0 | 0 | highly resistant |
| | | 100 | 15 | 1 | 0 | 0 | 2 | highly resistant |
| Ecotype 7 | TaHPPD7-02 | 0 | 16 | 0 | 0 | 0 | 0 | |
| | | 25 | 0 | 0 | 0 | 16 | 100 | non-resistant |
| | | 100 | 0 | 0 | 0 | 16 | 100 | non-resistant |
| | TaHPPD7m-F372A-02 | 0 | 16 | 0 | 0 | 0 | 0 | |
| | | 25 | 12 | 4 | 0 | 0 | 8 | highly resistant |
| | | 100 | 6 | 10 | 0 | 0 | 21 | moderately resistant |

[0193] The results of TABLE 3 show that all the Arabidopsisthaliana plants into which HPPD genes with a mutation at position 372 from different ecotypes of Triticumaestivum were introduced had good tolerance to topramezone (with high or moderate resistance) while the Arabidopsisthaliana plants into which unmutated HPPD genes were introduced and the wild-type Arabidopsisthaliana plants showed no tolerance to topramezone. This indicates that mutation of position 372 of HPPD amino acid sequences from different ecotypes within the same species (F372A) can impart tolerance to topramezone upone plants; i.e., the effects of mutation are identical for the HPPD amino acid sequences from different ecotypes within the same species.

### Example 4: Different Forms of Mutation at the 372 Position of HPPD Amino Acid Sequence from Different Species and Verification of the Mutation Effects

[0194] In order to further verify the effects of different forms of the mutation at the 372 position of HPPD amino acid sequence, saturation mutations of all amino acids were performed at the 372 position of HPPD from the plant source ( Avenasativa) and the microorganism source ( Pseudomonasfluorescens), both of which showed better tolerance to topramezone.

### 1. Acquisition of Saturation Mutation of HPPD from Avena Sativa and Pseudomonas Fluorescens Sources

[0195] The 372 position of the AsHPPD amino acid sequence was subjected to saturation mutation, that is, the original phenylalanine was mutated into other 18 amino acids respectively (except phenylalanine and alanine) deletion mutation, to obtain the AsHPPDm-F372G amino acid sequence as set forth in SEQ ID NO:219 in the SEQUENCE LISTING, the AsHPPDm-F372V amino acid sequence as set forth in SEQ ID NO:220 in the SEQUENCE LISTING, the AsHPPDm-F372L amino acid sequence as set forth in SEQ ID NO:221 in the SEQUENCE LISTING, the AsHPPDm-F372I amino acid sequence as set forth in SEQ ID NO:222 in the SEQUENCE LISTING, the AsHPPDm-F372P amino acid sequence as set forth in SEQ ID NO:223 in the SEQUENCE LISTING, the AsHPPDm-F372Y amino acid sequence as set forth in SEQ ID NO:224 in the SEQUENCE LISTING, the AsHPPDm-F372W amino acid sequence as set forth in SEQ ID NO:225 in the SEQUENCE LISTING, the AsHPPDm-F372S amino acid sequence as set forth in SEQ ID NO:226 in the SEQUENCE LISTING, the AsHPPDm-F372T amino acid sequence as set forth in SEQ ID NO:227 in the SEQUENCE LISTING, the AsHPPDm-F372C amino acid sequence as set forth in SEQ ID NO:228 in the SEQUENCE LISTING, the AsHPPDm-F372M amino acid sequence as set forth in SEQ ID NO:229 in the SEQUENCE LISTING, the AsHPPDm-F372N amino acid sequence as set forth in SEQ ID NO:230 in the SEQUENCE LISTING, the AsHPPDm-F372Q amino acid sequence as set forth in SEQ ID NO:231 in the SEQUENCE LISTING, the AsHPPDm-F372D amino acid sequence as set forth in SEQ ID NO:232 in the SEQUENCE LISTING, the AsHPPDm-F372E amino acid sequence as set forth in SEQ ID NO:233 in the SEQUENCE LISTING, the AsHPPDm-F372K amino acid sequence as set forth in SEQ ID NO:234 in the SEQUENCE LISTING, the AsHPPDm-F372R amino acid sequence as set forth in SEQ ID NO:235 in the SEQUENCE LISTING, the AsHPPDm-F372H amino acid sequence as set forth in SEQ ID NO:236 in the SEQUENCE LISTING, and the AsHPPDm-F372 amino acid sequence (deletion) as set forth in SEQ ID NO:237 in the SEQUENCE LISTING; the nucleotide sequences encoding the above amino acid sequences were obtained based on the Arabidopsisthaliana/soybean/rice common codon usage bias, that is, the AsHPPDm-F372G nucleotide sequence as set forth in SEQ ID NO:238 in the SEQUENCE LISTING, the AsHPPDm-F372V nucleotide sequence as set forth in SEQ ID NO:239 in the SEQUENCE LISTING, the AsHPPDm-F372L nucleotide sequence as set forth in SEQ ID NO:240 in the SEQUENCE LISTING, the AsHPPDm-F372I nucleotide sequence as set forth in SEQ ID NO:241 in the SEQUENCE LISTING, the AsHPPDm-F372P nucleotide sequence as set forth in SEQ ID NO:242 in the SEQUENCE LISTING, the AsHPPDm-F372Y nucleotide sequence as set forth in SEQ ID NO:243 in the SEQUENCE LISTING, the AsHPPDm-F372W nucleotide sequence as set forth in SEQ ID NO:244 in the SEQUENCE LISTING, the AsHPPDm-F372S nucleotide sequence as set forth in SEQ ID NO:245 in the SEQUENCE LISTING, the AsHPPDm-F372T nucleotide sequence as set forth in SEQ ID NO:246 in the SEQUENCE LISTING, the AsHPPDm-F372C nucleotide sequence as set forth in SEQ ID NO:247 in the SEQUENCE LISTING, the AsHPPDm-F372M nucleotide sequence as set forth in SEQ ID NO:248 in the SEQUENCE LISTING, the AsHPPDm-F372N nucleotide sequence as set forth in SEQ ID NO:249 in the SEQUENCE LISTING, the AsHPPDm-F372Q nucleotide sequence as set forth in SEQ ID NO:250 in the SEQUENCE LISTING, the AsHPPDm-F372D nucleotide sequence as set forth in SEQ ID NO:251 in the SEQUENCE LISTING, the AsHPPDm-F372E nucleotide sequence as set forth in SEQ ID NO:252 in the SEQUENCE LISTING, the AsHPPDm-F372K nucleotide sequence as set forth in SEQ ID NO:253 in the SEQUENCE LISTING, the AsHPPDm-F372R nucleotide sequence as set forth in SEQ ID NO:254 in the SEQUENCE LISTING, the AsHPPDm-F372H nucleotide sequence as set forth in SEQ ID NO:255 in the SEQUENCE LISTING, and the AsHPPDm-F372 nucleotide sequence (deletion) as set forth in SEQ ID NO:256 in the SEQUENCE LISTING.

[0196] The 372 position of the PfHPPD amino acid sequence was subjected to saturation mutation, that is, the original phenylalanine was mutated into other 18 amino acids respectively (except phenylalanine and alanine) and deletion mutation, to obtain the PfHPPDm-F372G amino acid sequence as set forth in SEQ ID NO:257 in the SEQUENCE LISTING, the PfHPPDm-F372V amino acid sequence as set forth in SEQ ID NO:258 in the SEQUENCE LISTING, the PfHPPDm-F372L amino acid sequence as set forth in SEQ ID NO:259 in the SEQUENCE LISTING, the PfHPPDm-F372I amino acid sequence as set forth in SEQ ID NO:260 in the SEQUENCE LISTING, the PfHPPDm-F372P amino acid sequence as set forth in SEQ ID NO:261 in the SEQUENCE LISTING, the PfHPPDm-F372Y amino acid sequence as set forth in SEQ ID NO:262 in the SEQUENCE LISTING, the PfHPPDm-F372W amino acid sequence as set forth in SEQ ID NO:263 in the SEQUENCE LISTING, the PfHPPDm-F372S amino acid sequence as set forth in SEQ ID NO:264 in the SEQUENCE LISTING, the PfHPPDm-F372T amino acid sequence as set forth in SEQ ID NO:265 in the SEQUENCE LISTING, the PfHPPDm-F372C amino acid sequence as set forth in SEQ ID NO:266 in the SEQUENCE LISTING, the PfHPPDm-F372M amino acid sequence as set forth in SEQ ID NO:267 in the SEQUENCE LISTING, the PfHPPDm-F372N amino acid sequence as set forth in SEQ ID NO:268 in the SEQUENCE LISTING, the PfHPPDm-F372Q amino acid sequence as set forth in SEQ ID NO:269 in the SEQUENCE LISTING, the PfHPPDm-F372D amino acid sequence as set forth in SEQ ID NO:270 in the SEQUENCE LISTING, the PfHPPDm-F372E amino acid sequence as set forth in SEQ ID NO:271 in the SEQUENCE LISTING, the PfHPPDm-F372K amino acid sequence as set forth in SEQ ID NO:272 in the SEQUENCE LISTING, the PfHPPDm-F372R amino acid sequence as set forth in SEQ ID NO:273 in the SEQUENCE LISTING, the PfHPPDm-F372H amino acid sequence as set forth in SEQ ID NO:274 in the SEQUENCE LISTING, and the PfHPPDm-F372 amino acid sequence (deletion) as set forth in SEQ ID NO:275 in the SEQUENCE LISTING; the nucleotide sequences encoding the above amino acid sequences were obtained based on the Arabidopsisthaliana/soybean/rice common usage bias, that is, the PfHPPDm-F372G nucleotide sequence as set forth in SEQ ID NO:276 in the SEQUENCE LISTING, the PfHPPDm-F372V nucleotide sequence as set forth in SEQ ID NO:277 in the SEQUENCE LISTING, the PfHPPDm-F372L nucleotide sequence as set forth in SEQ ID NO:278 in the SEQUENCE LISTING, the PfHPPDm-F3721 nucleotide sequence as set forth in SEQ ID NO:279 in the SEQUENCE LISTING, the PfHPPDm-F372P nucleotide sequence as set forth in SEQ ID NO:280 in the SEQUENCE LISTING, the PfHPPDm-F372Y nucleotide sequence as set forth in SEQ ID NO:281 in the SEQUENCE LISTING, the PfHPPDm-F372W nucleotide sequence as set forth in SEQ ID NO:282 in the SEQUENCE LISTING, the PfHPPDm-F372S nucleotide sequence as set forth in SEQ ID NO:283 in the SEQUENCE LISTING, the PfHPPDm-F372T nucleotide sequence as set forth in SEQ ID NO:284 in the SEQUENCE LISTING, the PfHPPDm-F372C nucleotide sequence as set forth in SEQ ID NO:285 in the SEQUENCE LISTING, the PfHPPDm-F372M nucleotide sequence as set forth in SEQ ID NO:286 in the SEQUENCE LISTING, the PfHPPDm-F372N nucleotide sequence as set forth in SEQ ID NO:287 in the SEQUENCE LISTING, the PfHPPDm-F372Q nucleotide sequence as set forth in SEQ ID NO:288 in the SEQUENCE LISTING, the PfHPPDm-F372D nucleotide sequence as set forth in SEQ ID NO:289 in the SEQUENCE LISTING, the PfHPPDm-F372E nucleotide sequence as set forth in SEQ ID NO:290 in the SEQUENCE LISTING, the PfHPPDm-F372K nucleotide sequence as set forth in SEQ ID NO:291 in the SEQUENCE LISTING, the PfHPPDm-F372R nucleotide sequence as set forth in SEQ ID NO:292 in the SEQUENCE LISTING, the PfHPPDm-F372H nucleotide sequence as set forth in SEQ ID NO:293 in the SEQUENCE LISTING, and the PfHPPDm-F372 nucleotide sequence (deletion) as set forth in SEQ ID NO:294 in the SEQUENCE LISTING.

### 2. Construction of Recombinant Expression Vectors Containing Saturation Mutation of HPPD for Arabidopsis Thaliana

[0197] According to the method of constructing the recombinant expression vector DBN11375 containing AsHPPDm-F372A-02 nucleotide sequence as described in point 3 of Example 1, the AsHPPDm-F372G nucleotide sequence, AsHPPDm-F372V nucleotide sequence, AsHPPDm-F372L nucleotide sequence, AsHPPDm-F372I nucleotide sequence, AsHPPDm-F372P nucleotide sequence, AsHPPDm-F372Y nucleotide sequence, AsHPPDm-F372W nucleotide sequence, AsHPPDm-F372S nucleotide sequence, AsHPPDm-F372T nucleotide sequence, AsHPPDm-F372C nucleotide sequence, AsHPPDm-F372M nucleotide sequence, AsHPPDm-F372N nucleotide sequence, AsHPPDm-F372Q nucleotide sequence, AsHPPDm-F372D nucleotide sequence, AsHPPDm-F372E nucleotide sequence, AsHPPDm-F372K nucleotide sequence, AsHPPDm-F372R nucleotide sequence, AsHPPDm-F372H nucleotide sequence, AsHPPDm-F372 nucleotide sequence, and the PfHPPDm-F372G nucleotide sequence, PfHPPDm-F372V nucleotide sequence, PfHPPDm-F372L nucleotide sequence, PfHPPDm-F372I nucleotide sequence, PfHPPDm-F372P nucleotide sequence, PfHPPDm-F372Y nucleotide sequence, PfHPPDm-F372W nucleotide sequence, PfHPPDm-F372S nucleotide sequence, PfHPPDm-F372T nucleotide sequence, PfHPPDm-F372C nucleotide sequence, PfHPPDm-F372M nucleotide sequence, PfHPPDm-F372N nucleotide sequence, PfHPPDm-F372Q nucleotide sequence, PfHPPDm-F372D nucleotide sequence, PfHPPDm-F372E nucleotide sequence, PfHPPDm-F372K nucleotide sequence, PfHPPDm-F372R nucleotide sequence, PfHPPDm-F372H nucleotide sequence, and PfHPPDm-F372 nucleotide sequence which were linked with the universal adapter primer 1 were respectively subjected to a recombination reaction with the linearized DBNBC-01 expression vector skeleton to obtain the recombinant expression vectors DBN11410 to DBN11447 in sequence. Sequencing verified that the above nucleotide sequences were inserted correctly in the recombinant expression vectors DBN11410 to DBN11447.

### 3. Transformation of Agrobacterium with the Recombinant Expression Vectors for Arabidopsis Thaliana

[0198] According to the method of transformation of Agrobacterium with the recombinant expression vectors for Arabidopsisthaliana as described above in point 4 of Example 1, the recombinant expression vectors DBN11410 to DBN11447 which had been correctly constructed were transformed into the Agrobacterium GV3101 respectively using a liquid nitrogen method, and the results were verified by sequencing, showing that the structures of the recombinant expression vectors DBN11410 to DBN11447 were completely correct.

### 4. Detection of the Herbicide Tolerance of the Arabidopsis Thaliana Plants into Which Saturation Mutation of HPPD was Introduced

[0199] According to the method as described above in point 5 of Example 1, Arabidopsisthaliana inflorescences were immersed in the Agrobacterium solution as described in Example 3 so as to introduce the T-DNA of the recombinant expression vectors DBN11410 to DBN11447 constructed in Example 2 into the Arabidopsisthaliana chromosomes, thereby obtaining the corresponding transgenic Arabidopsisthaliana plants, that is, the Arabidopsisthaliana T₁ plants into which the AsHPPDm-F372G nucleotide sequence was introduced, Arabidopsisthaliana T₁ plants into which the AsHPPDm-F372V nucleotide sequence was introduced, Arabidopsisthaliana T₁ plants into which the AsHPPDm-F372L nucleotide sequence was introduced, Arabidopsisthaliana T₁ plants into which the AsHPPDm-F372I nucleotide sequence was introduced, Arabidopsisthaliana T₁ plants into which the AsHPPDm-F372P nucleotide sequence was introduced, Arabidopsisthaliana T₁ plants into which the AsHPPDm-F372Y nucleotide sequence was introduced, Arabidopsisthaliana T₁ plants into which the AsHPPDm-F372W nucleotide sequence was introduced, Arabidopsisthaliana T₁ plants into which the AsHPPDm-F372S nucleotide sequence was introduced, Arabidopsisthaliana T₁ plants into which the AsHPPDm-F372T nucleotide sequence was introduced, Arabidopsisthaliana T₁ plants into which the AsHPPDm-F372C nucleotide sequence was introduced, Arabidopsisthaliana T₁ plants into which the AsHPPDm-F372M nucleotide sequence was introduced, Arabidopsisthaliana T₁ plants into which the AsHPPDm-F372N nucleotide sequence was introduced, Arabidopsisthaliana T, plants into which the AsHPPDm-F372Q nucleotide sequence was introduced, Arabidopsisthaliana T₁ plants into which the AsHPPDm-F372D nucleotide sequence was introduced, Arabidopsisthaliana T₁ plants into which the AsHPPDm-F372E nucleotide sequence was introduced, Arabidopsisthaliana T₁ plants into which the AsHPPDm-F372K nucleotide sequence was introduced, Arabidopsisthaliana T₁ plants into which the AsHPPDm-F372R nucleotide sequence was introduced, Arabidopsisthaliana T₁ plants into which the AsHPPDm-F372H nucleotide sequence was introduced, Arabidopsisthaliana T₁ plants into which the AsHPPDm-F372 nucleotide sequence was introduced, and Arabidopsisthaliana T₁ plants into which the PfHPPDm-F372G nucleotide sequence was introduced, Arabidopsisthaliana T₁ plants into which the PfHPPDm-F372V nucleotide sequence was introduced, Arabidopsisthaliana T₁ plants into which the PfHPPDm-F372L nucleotide sequence was introduced, Arabidopsisthaliana T₁ plants into which the PfHPPDm-F372I nucleotide sequence was introduced, Arabidopsisthaliana Tt plants into which the PfHPPDm-F372P nucleotide sequence was introduced, Arabidopsisthaliana T₁ plants into which the PfHPPDm-F372Y nucleotide sequence was introduced, Arabidopsisthaliana T₁ plants into which the PfHPPDm-F372W nucleotide sequence was introduced, Arabidopsisthaliana T₁ plants into which the PfHPPDm-F372S nucleotide sequence was introduced, Arabidopsisthaliana T₁ plants into which the PfHPPDm-F372T nucleotide sequence was introduced, Arabidopsisthaliana T₁ plants into which the PfHPPDm-F372C nucleotide sequence was introduced, Arabidopsisthaliana T₁ plants into which the PfHPPDm-F372M nucleotide sequence was introduced, Arabidopsisthaliana T₁ plants into which the PfHPPDm-F372N nucleotide sequence was introduced, Arabidopsisthaliana T₁ plants into which the PfHPPDm-F372Q nucleotide sequence was introduced, Arabidopsisthaliana T₁ plants into which the PfHPPDm-F372D nucleotide sequence was introduced, Arabidopsisthaliana T₁ plants into which the PfHPPDm-F372E nucleotide sequence was introduced, Arabidopsisthaliana T₁ plants into which the PfHPPDm-F372K nucleotide sequence was introduced, Arabidopsisthaliana T₁ plants into which the PfHPPDm-F372R nucleotide sequence was introduced, Arabidopsisthaliana T₁ plants into which the PfHPPDm-F372H nucleotide sequence was introduced, and Arabidopsisthaliana T₁ plants into which the PfHPPDm-F372 nucleotide sequence was introduced.

[0200] According to the method as described above in point 6 of Example 1, the above-mentioned Arabidopsisthaliana T₁ plants, Arabidopsisthaliana T₁ plants into which the AsHPPD-02 nucleotide sequence was introduced, Arabidopsisthaliana T₁ plants into which the PfHPPD-02 nucleotide sequence was introduced, and wild-type Arabidopsisthaliana plants (18 days after sowing) were sprayed with topramezone at four different concentrations respectively, that is, 25 g ai/ha (one-fold field concentration, 1x), 50 g ai/ha (two-fold field concentration, 2x), 100 g ai/ha (four-fold field concentration, 4x) and 0 g ai/ha (water, Ox) to detect the herbicide tolerance of Arabidopsisthaliana. The experimental results are shown in TABLEs 4 and 5.

TABLE 4

Topramezone tolerance of Arabidopsis thaliana T₁ plants into which saturation mutation of HPPD from Avena sativa source was introduced
Statistical data after evaluation of gene from Avena sativa source

| Mutation type of HPPD from Avena sativa source | Treatment concentration (g ai/ha) | Grade 0 | Grade 1 | Grade 2 | Grade 3 | score | Resistance Grade |
|---|---|---|---|---|---|---|---|
| Wild-type Arabidopsis thaliana | 0 | 20 | 0 | 0 | 0 | 0 | |
| | 25 | 20 | 0 | 0 | 0 | 0 | Non-resistant |
| | 50 | 20 | 0 | 0 | 0 | 0 | Non-resistant |
| | 100 | 20 | 0 | 0 | 0 | 0 | Non-resistant |
| AsHPPD-02 | 0 | 20 | 0 | 0 | 0 | 0 | |
| | 25 | 2 | 2 | 16 | 0 | 57 | Poorly resistant |
| | 50 | 0 | 2 | 4 | 14 | 87 | Non-resistant |
| | 100 | 0 | 0 | 4 | 16 | 93 | Non-resistant |
| F372G | 0 | 20 | 0 | 0 | 0 | 0 | |
| | 25 | 20 | 0 | 0 | 0 | 0 | Highly resistant |
| | 50 | 20 | 0 | 0 | 0 | 0 | Highly resistant |
| | 100 | 20 | 0 | 0 | 0 | 0 | Highly resistant |
| F372V | 0 | 20 | 0 | 0 | 0 | 0 | |
| | 25 | 20 | 0 | 0 | 0 | 0 | Highly resistant |
| | 50 | 20 | 0 | 0 | 0 | 0 | Highly resistant |
| | 100 | 20 | 0 | 0 | 0 | 0 | Highly resistant |
| F372L | 0 | 20 | 0 | 0 | 0 | 0 | |
| | 25 | 20 | 0 | 0 | 0 | 0 | Highly resistant |
| | 50 | 20 | 0 | 0 | 0 | 0 | Highly resistant |
| | 100 | 6 | 10 | 4 | 0 | 30 | Moderately resistant |
| F3721 | 0 | 20 | 0 | 0 | 0 | 0 | |
| | 25 | 20 | 0 | 0 | 0 | 0 | Highly resistant |
| | 50 | 20 | 0 | 0 | 0 | 0 | Highly resistant |
| | 100 | 20 | 0 | 0 | 0 | 0 | Highly resistant |
| F372P | 0 | 20 | 0 | 0 | 0 | 0 | |
| | 25 | 20 | 0 | 0 | 0 | 0 | Highly resistant |
| | 50 | 20 | 0 | 0 | 0 | 0 | Highly resistant |
| | 100 | 4 | 12 | 4 | 0 | 33 | Moderately resistant |
| F372Y | 0 | 20 | 0 | 0 | 0 | 0 | |
| | 25 | 0 | 0 | 0 | 20 | 100 | Non-resistant |
| | 50 | 0 | 4 | 0 | 16 | 87 | Non-resistant |
| | 100 | 0 | 0 | 0 | 20 | 100 | Non-resistant |
| F372W | 0 | 20 | 0 | 0 | 0 | 0 | |
| | 25 | 6 | 6 | 8 | 0 | 37 | Poorly resistant |
| | 50 | 0 | 0 | 0 | 20 | 100 | Non-resistant |
| | 100 | 0 | 0 | 0 | 20 | 100 | Non-resistant |
| F372S | 0 | 20 | 0 | 0 | 0 | 0 | |
| | 25 | 20 | 0 | 0 | 0 | 0 | Highly resistant |
| | 50 | 20 | 0 | 0 | 0 | 0 | Highly resistant |
| | 100 | 20 | 0 | 0 | 0 | 0 | Highly resistant |
| F372T | 0 | 20 | 0 | 0 | 0 | 0 | |
| | 25 | 20 | 0 | 0 | 0 | 0 | Highly resistant |
| | 50 | 18 | 2 | 0 | 0 | 3 | Highly resistant |
| | 100 | 10 | 10 | 0 | 0 | 17 | Moderately resistant |
| F372C | 0 | 20 | 0 | 0 | 0 | 0 | |
| | 25 | 20 | 0 | 0 | 0 | 0 | Highly resistant |
| | 50 | 18 | 2 | 0 | 0 | 3 | Highly resistant |
| | 100 | 8 | 8 | 4 | 0 | 27 | Moderately resistant |
| F372M | 0 | 20 | 0 | 0 | 0 | 0 | |
| | 25 | 20 | 0 | 0 | 0 | 0 | Highly resistant |
| | 50 | 8 | 12 | 0 | 0 | 20 | Moderately resistant |
| | 100 | 2 | 6 | 12 | 0 | 50 | Poorly resistant |
| F372N | 0 | 20 | 0 | 0 | 0 | 0 | |
| | 25 | 18 | 0 | 2 | 0 | 7 | Highly resistant |
| | 50 | 20 | 0 | 0 | 0 | 0 | Highly resistant |
| | 100 | 20 | 0 | 0 | 0 | 0 | Highly resistant |
| F372Q | 0 | 20 | 0 | 0 | 0 | 0 | |
| | 25 | 20 | 0 | 0 | 0 | 0 | Highly resistant |
| | 50 | 20 | 0 | 0 | 0 | 0 | Highly resistant |
| | 100 | 20 | 0 | 0 | 0 | 0 | Highly resistant |
| F372D | 0 | 20 | 0 | 0 | 0 | 0 | |
| | 25 | 16 | 4 | 0 | 0 | 7 | Highly resistant |
| | 50 | 20 | 0 | 0 | 0 | 0 | Highly resistant |
| | 100 | 20 | 0 | 0 | 0 | 0 | Highly resistant |
| F372E | 0 | 20 | 0 | 0 | 0 | 0 | |
| | 25 | 0 | 8 | 8 | 4 | 60 | Poorly resistant |
| | 50 | 0 | 6 | 10 | 4 | 63 | Poorly resistant |
| | 100 | 0 | 0 | 2 | 18 | 97 | Non-resistant |
| F372K. | 0 | 20 | 0 | 0 | 0 | 0 | |
| | 25 | 0 | 20 | 0 | 0 | 33 | Moderately resistant |
| | 50 | 2 | 8 | 10 | 0 | 47 | Poorly resistant |
| | 100 | 0 | 0 | 6 | 14 | 90 | Non-resistant |
| F372R | 0 | 20 | 0 | 0 | 0 | 0 | |
| | 25 | 0 | 0 | 0 | 20 | 100 | Non-resistant |
| | 50 | 0 | 0 | 0 | 20 | 100 | Non-resistant |
| | 100 | 0 | 0 | 0 | 20 | 100 | Non-resistant |
| F372H | 0 | 20 | 0 | 0 | 0 | 0 | |
| | 25 | 0 | 6 | 2 | 12 | 77 | Non-resistant |
| | 50 | 0 | 2 | 10 | 8 | 77 | Non-resistant |
| | 100 | 0 | 0 | 0 | 20 | 100 | Non-resistant |
| F372 deletion | 0 | 20 | 0 | 0 | 0 | 0 | |
| | 25 | 20 | 0 | 0 | 0 | 0 | Highly resistant |
| | 50 | 20 | 0 | 0 | 0 | 0 | Highly resistant |
| | 100 | 18 | 2 | 0 | 0 | 3 | Highly resistant |

TABLE 5

Topramezone tolerance of Arabidopsis thaliana T₁ plants into which saturation mutation of HPPD from Pseudomonas fluorescens source was introduced
Statistical data after evaluation of gene from Pseudomonas fluorescens source

| Mutation type of HPPD from Pseudomonas fluorescens source | Treatment concentration (g ai/ha) | Grade 0 | Grade 1 | Grade 2 | Grade 3 | score | Resistance Grade |
|---|---|---|---|---|---|---|---|
| PfHPPD-02 | 0 | 20 | 0 | 0 | 0 | 0 | |
| | 25 | 0 | 0 | 0 | 20 | 100 | Non-resistant |
| | 50 | 0 | 0 | 0 | 20 | 100 | Non-resistant |
| | 100 | 0 | 0 | 0 | 20 | 100 | Non-resistant |
| F372G | 0 | 20 | 0 | 0 | 0 | 0 | |
| | 25 | 4 | 14 | 2 | 0 | 30 | Moderately resistant |
| | 50 | 0 | 18 | 2 | 0 | 37 | Poorly resistant |
| | 100 | 0 | 12 | 8 | 0 | 47 | Poorly resistant |
| F372V | 0 | 20 | 0 | 0 | 0 | 0 | |
| | 25 | 2 | 10 | 8 | 0 | 43 | Poorly resistant |
| | 50 | 0 | 14 | 6 | 0 | 43 | Poorly resistant |
| | 100 | 0 | 4 | 12 | 4 | 67 | Poorly resistant |
| F372L | 0 | 20 | 0 | 0 | 0 | 0 | |
| | 25 | 0 | 0 | 0 | 20 | 100 | Non-resistant |
| | 50 | 0 | 0 | 0 | 20 | 100 | Non-resistant |
| | 100 | 0 | 0 | 0 | 20 | 100 | Non-resistant |
| F3721 | 0 | 20 | 0 | 0 | 0 | 0 | |
| | 25 | 0 | 6 | 6 | 8 | 70 | Non-resistant |
| | 50 | 0 | 0 | 2 | 18 | 97 | Non-resistant |
| | 100 | 0 | 0 | 0 | 20 | 100 | Non-resistant |
| F372P | 0 | 20 | 0 | 0 | 0 | 0 | |
| | 25 | 10 | 8 | 2 | 0 | 20 | Moderately resistant |
| | 50 | 4 | 8 | 4 | 4 | 47 | Poorly resistant |
| | 100 | 0 | 0 | 5 | 15 | 92 | Non-resistant |
| F372Y | 0 | 20 | 0 | 0 | 0 | 0 | |
| | 25 | 0 | 0 | 0 | 20 | 100 | Non-resistant |
| | 50 | 0 | 0 | 0 | 20 | 100 | Non-resistant |
| | 100 | 0 | 0 | 0 | 20 | 100 | Non-resistant |
| F372W | 0 | 20 | 0 | 0 | 0 | 0 | |
| | 25 | 0 | 0 | 2 | 18 | 97 | Non-resistant |
| | 50 | 0 | 0 | 0 | 20 | 100 | Non-resistant |
| | 100 | 0 | 0 | 0 | 20 | 100 | Non-resistant |
| F372S | 0 | 20 | 0 | 0 | 0 | 0 | |
| | 25 | 6 | 10 | 4 | 0 | 30 | Moderately resistant |
| | 50 | 0 | 8 | 8 | 4 | 60 | Poorly resistant |
| | 100 | 0 | 0 | 2 | 18 | 97 | Non-resistant |
| F372T | 0 | 20 | 0 | 0 | 0 | 0 | |
| | 25 | 8 | 6 | 2 | 4 | 37 | Poorly resistant |
| | 50 | 0 | 8 | 4 | 8 | 67 | Poorly resistant |
| | 100 | 0 | 0 | 2 | 18 | 97 | Non-resistant |
| F372C | 0 | 20 | 0 | 0 | 0 | 0 | |
| | 25 | 0 | 12 | 6 | 2 | 50 | Poorly resistant |
| | 50 | 2 | 4 | 4 | 10 | 70 | Non-resistant |
| | 100 | 0 | 0 | 0 | 20 | 100 | Non-resistant |
| F372M | 0 | 20 | 0 | 0 | 0 | 0 | |
| | 25 | 4 | 6 | 4 | 6 | 53 | Poorly resistant |
| | 50 | 2 | 0 | 4 | 14 | 83 | Non-resistant |
| | 100 | 0 | 0 | 0 | 20 | 100 | Non-resistant |
| F372N | 0 | 20 | 0 | 0 | 0 | 0 | |
| | 25 | 0 | 2 | 6 | 12 | 83 | Non-resistant |
| | 50 | 0 | 0 | 0 | 20 | 100 | Non-resistant |
| | 100 | 0 | 0 | 0 | 20 | 100 | Non-resistant |
| F372Q | 0 | 20 | 0 | 0 | 0 | 0 | |
| | 25 | 2 | 4 | 10 | 4 | 60 | Poorly resistant |
| | 50 | 0 | 4 | 6 | 10 | 77 | Non-resistant |
| | 100 | 0 | 0 | 0 | 20 | 100 | Non-resistant |
| F372D | 0 | 20 | 0 | 0 | 0 | 0 | |
| | 25 | 0 | 8 | 4 | 8 | 67 | Poorly resistant |
| | 50 | 0 | 0 | 8 | 12 | 87 | Non-resistant |
| | 100 | 0 | 0 | 0 | 20 | 100 | Non-resistant |
| F372E | 0 | 20 | 0 | 0 | 0 | 0 | |
| | 25 | 0 | 0 | 4 | 16 | 93 | Non-resistant |
| | 50 | 0 | 0 | 0 | 20 | 100 | Non-resistant |
| | 100 | 0 | 0 | 0 | 20 | 100 | Non-resistant |
| F372K | 0 | 20 | 0 | 0 | 0 | 0 | |
| | 25 | 0 | 0 | 0 | 20 | 100 | Non-resistant |
| | 50 | 0 | 0 | 0 | 20 | 100 | Non-resistant |
| | 100 | 0 | 0 | 0 | 20 | 100 | Non-resistant |
| F372R | 0 | 20 | 0 | 0 | 0 | 0 | |
| | 25 | 0 | 0 | 0 | 20 | 100 | Non-resistant |
| | 50 | 0 | 0 | 0 | 20 | 100 | Non-resistant |
| | 100 | 0 | 0 | 0 | 20 | 100 | Non-resistant |
| F372H | 0 | 20 | 0 | 0 | 0 | 0 | |
| | 25 | 0 | 0 | 0 | 20 | 100 | Non-resistant |
| | 50 | 0 | 0 | 0 | 20 | 100 | Non-resistant |
| | 100 | 0 | 0 | 0 | 20 | 100 | Non-resistant |
| F372 deletion | 0 | 20 | 0 | 0 | 0 | 0 | |
| | 25 | 0 | 10 | 10 | 0 | 50 | Poorly resistant |
| | 50 | 0 | 6 | 11 | 3 | 62 | Poorly resistant |
| | 100 | 0 | 2 | 10 | 8 | 77 | Non-resistant |

[0201] The results in TABLEs 4 and 5 showed that: (1) after saturation mutation of HPPD from Avenasativa source, except that the Arabidopsisthaliana plants with mutated forms of F372Y, F372R and F372H had no tolerance to topramezone, the Arabidopsisthaliana plants with other mutated forms had different degrees of tolerance to topramezone, and especially those with mutated forms of F372G, F372V, F372I, F372N, F372Q, F372D, F372(deletion) had better tolerance to topramezone, while the wild-type Arabidopsisthaliana plants and the Arabidopsisthaliana plants into which unmutated HPPD gene (AsHPPD-02) was introduced had no or low tolerance to various concentrations of topramezone; therefore, the mutation at 372 position of HPPD amino acid sequence from Avenasativa source into F372A, F372G, F372V, F372L, F372I, F372P, F372W, F372S, F372T, F372C, F372M, F372N, F372Q, F372D, F372E, F372K and F372 (deletion) can confer tolerance to topramezone upon plants; (2) after saturation mutation of HPPD from Pseudomonasfluorescens source, the Arabidopsisthaliana plants with mutated forms of F372G, F372V, F372P, F372S, F372T, F372C, F372M, F372Q, F372D and F372 (deletion) had different degrees of tolerance to topramezone, the Arabidopsisthaliana plants with other mutated forms had no tolerance to topramezone, while the Arabidopsisthaliana plants into which unmutated HPPD gene (PfHPPD-02) was introduced and the wild-type Arabidopsisthaliana plants had no tolerance to topramezone; therefore, the mutation at 372 position of HPPD amino acid sequence from Pseudomonasfluorescens source into F372A, F372G, F372V, F372P, F372S, F372T, F372C, F372M, F372Q, F372D and F372 (deletion) can confer tolerance to topramezone upon plants. The results also showed that the mutation at 372 position of HPPD amino acid sequence from Avenasativa source and Pseudomonasfluorescens source into F372G and F372V can confer better tolerance to topramezone upon plants.

### Example 5: Mutation at 372 Position of HPPD Amino Acid Sequence From Different Species Sources (F372G and F372V) and Verification of the Mutation Effects

[0202] In order to further verify the effects of the F372G or F372V mutation at 372 position of HPPD amino acid sequence from different species sources, mutation (F372G or F372V) was performed at the 372 position of HPPD amino acid sequence from representative species sources selected in the Example 2.

### 1. Acquisition of Mutant HPPD (F372G and F372V) from Different Species Sources

[0203] The 372 position of the ZmHPPD amino acid sequence was mutated from the original phenylalanine to glycine, to obtain the mutated ZmHPPD (ZmHPPDm-F372G) amino acid sequence as set forth in SEQ ID NO:295 in the SEQUENCE LISTING, and the ZmHPPDm-F372G nucleotide sequence encoding the ZmHPPDm-F372G, which was obtained based on the Arabidopsisthaliana codon usage bias, is set forth as SEQ ID NO:296 in the SEQUENCE LISTING.

[0204] The 372 position of the AtHPPD amino acid sequence was mutated from the original phenylalanine to glycine, to obtain the mutated AtHPPD (AtHPPDm-F372G) amino acid sequence as set forth in SEQ ID NO:297 in the SEQUENCE LISTING, and the AtHPPDm-F372G nucleotide sequence encoding the AtHPPDm-F372G was set forth as SEQ ID NO:298 in the SEQUENCE LISTING.

[0205] The 372 position of the GsHPPD amino acid sequence was mutated from the original phenylalanine to glycine, to obtain the mutated GsHPPD (GsHPPDm-F372G) amino acid sequence as set forth in SEQ ID NO:299 in the SEQUENCE LISTING, and the GsHPPDm-F372G nucleotide sequence encoding the GsHPPDm-F372G, which was obtained based on the Arabidopsisthaliana codon usage bias, is set forth as SEQ ID NO:300 in the SEQUENCE LISTING.

[0206] The 372 position of the TaHPPD amino acid sequence was mutated from the original phenylalanine to glycine, to obtain the mutated TaHPPD (TaHPPDm-F372G) amino acid sequence as set forth in SEQ ID NO:301 in the SEQUENCE LISTING, and the TaHPPDm-F372G nucleotide sequence encoding the TaHPPDm-F372G, which was obtained based on the Arabidopsisthaliana codon usage bias, is set forth as SEQ ID NO:302 in the SEQUENCE LISTING.

[0207] The 372 position of the BdHPPD amino acid sequence was mutated from the original phenylalanine to glycine, to obtain the mutated BdHPPD (BdHPPDm-F372G) amino acid sequence as set forth in SEQ ID NO:303 in the SEQUENCE LISTING, and the BdHPPDm-F372G nucleotide sequence encoding the BdHPPDm-F372G, which was obtained based on the Arabidopsisthaliana codon usage bias, is set forth as SEQ ID NO:304 in the SEQUENCE LISTING.

[0208] The 372 position of the HvHPPD amino acid sequence was mutated from the original phenylalanine to glycine, to obtain the mutated HvHPPD (HvHPPDm-F372G) amino acid sequence as set forth in SEQ ID NO:305 in the SEQUENCE LISTING, and the HvHPPDm-F372G nucleotide sequence encoding the HvHPPDm-F372G, which was obtained based on the Arabidopsisthaliana codon usage bias, is set forth as SEQ ID NO:306 in the SEQUENCE LISTING.

[0209] The 372 position of the SiHPPD amino acid sequence was mutated from the original phenylalanine to glycine, to obtain the mutated SiHPPD (SiHPPDm-F372G) amino acid sequence as set forth in SEQ ID NO:307 in the SEQUENCE LISTING, and the SiHPPDm-F372G nucleotide sequence encoding the SiHPPDm-F372G, which was obtained based on the Arabidopsisthaliana codon usage bias, is set forth as SEQ ID NO:308 in the SEQUENCE LISTING.

[0210] The 372 position of the SbHPPD amino acid sequence was mutated from the original phenylalanine to glycine, to obtain the mutated SbHPPD (SbHPPDm-F372G) amino acid sequence as set forth in SEQ ID NO:309 in the SEQUENCE LISTING, and the SbHPPDm-F372G nucleotide sequence encoding the SbHPPDm-F372G, which was obtained based on the Arabidopsisthaliana codon usage bias, is set forth as SEQ ID NO:310 in the SEQUENCE LISTING.

[0211] The 372 position of the OsHPPD amino acid sequence was mutated from the original phenylalanine to glycine, to obtain the mutated OsHPPD (OsHPPDm-F372G) amino acid sequence as set forth in SEQ ID NO:311 in the SEQUENCE LISTING, and the OsHPPDm-F372G nucleotide sequence encoding the OsHPPDm-F372G, which was obtained based on the Arabidopsisthaliana codon usage bias, is set forth as SEQ ID NO:312 in the SEQUENCE LISTING.

[0212] The 372 position of the GmHPPD amino acid sequence was mutated from the original phenylalanine to glycine, to obtain the mutated GmHPPD (GmHPPDm-F372G) amino acid sequence as set forth in SEQ ID NO:313 in the SEQUENCE LISTING, and the GmHPPDm-F372G nucleotide sequence encoding the GmHPPDm-F372G, which was obtained based on the Arabidopsisthaliana codon usage bias, is set forth as SEQ ID NO:314 in the SEQUENCE LISTING.

[0213] The 372 position of the CaHPPD amino acid sequence was mutated from the original phenylalanine to glycine, to obtain the mutated CaHPPD (CaHPPDm-F372G) amino acid sequence as set forth in SEQ ID NO:315 in the SEQUENCE LISTING, and the CaHPPDm-F372G nucleotide sequence encoding the CaHPPDm-F372G, which was obtained based on the Arabidopsisthaliana codon usage bias, is set forth as SEQ ID NO:316 in the SEQUENCE LISTING.

[0214] The 372 position of the BnHPPD amino acid sequence was mutated from the original phenylalanine to glycine, to obtain the mutated BnHPPD (BnHPPDm-F372G) amino acid sequence as set forth in SEQ ID NO:317 in the SEQUENCE LISTING, and the BnHPPDm-F372G nucleotide sequence encoding the BnHPPDm-F372G, which was obtained based on the Arabidopsisthaliana codon usage bias, is set forth as SEQ ID NO:318 in the SEQUENCE LISTING.

[0215] The 372 position of the HaHPPD amino acid sequence was mutated from the original phenylalanine to glycine, to obtain the mutated HaHPPD (HaHPPDm-F372G) amino acid sequence as set forth in SEQ ID NO:319 in the SEQUENCE LISTING, and the HaHPPDm-F372G nucleotide sequence encoding the HaHPPDm-F372G, which was obtained based on the Arabidopsisthaliana codon usage bias, is set forth as SEQ ID NO:320 in the SEQUENCE LISTING.

[0216] The 372 position of the MsHPPD amino acid sequence was mutated from the original phenylalanine to glycine, to obtain the mutated MsHPPD (MsHPPDm-F372G) amino acid sequence as set forth in SEQ ID NO:321 in the SEQUENCE LISTING, and the MsHPPDm-F372G nucleotide sequence encoding the MsHPPDm-F372G, which was obtained based on the Arabidopsisthaliana codon usage bias, is set forth as SEQ ID NO:322 in the SEQUENCE LISTING.

[0217] The 372 position of the BvHPPD amino acid sequence was mutated from the original phenylalanine to glycine, to obtain the mutated BvHPPD (BvHPPDm-F372G) amino acid sequence as set forth in SEQ ID NO:323 in the SEQUENCE LISTING, and the BvHPPDm-F372G nucleotide sequence encoding the BvHPPDm-F372G, which was obtained based on the Arabidopsisthaliana codon usage bias, is set forth as SEQ ID NO:324 in the SEQUENCE LISTING.

[0218] The 372 position of the NtHPPD amino acid sequence was mutated from the original phenylalanine to glycine, to obtain the mutated NtHPPD (NtHPPDm-F372G) amino acid sequence as set forth in SEQ ID NO:325 in the SEQUENCE LISTING, and the NtHPPDm-F372G nucleotide sequence encoding the NtHPPDm-F372G, which was obtained based on the Arabidopsisthaliana codon usage bias, is set forth as SEQ ID NO:326 in the SEQUENCE LISTING.

[0219] The 372 position of the CsHPPD amino acid sequence was mutated from the original phenylalanine to glycine, to obtain the mutated CsHPPD (CsHPPDm-F372G) amino acid sequence as set forth in SEQ ID NO:327 in the SEQUENCE LISTING, and the CsHPPDm-F372G nucleotide sequence encoding the CsHPPDm-F372G, which was obtained based on the Arabidopsisthaliana codon usage bias, is set forth as SEQ ID NO:328 in the SEQUENCE LISTING.

[0220] The 372 position of the StHPPD amino acid sequence was mutated from the original phenylalanine to glycine, to obtain the mutated StHPPD (StHPPDm-F372G) amino acid sequence as set forth in SEQ ID NO:329 in the SEQUENCE LISTING, and the StHPPDm-F372G nucleotide sequence encoding the StHPPDm-F372G, which was obtained based on the Arabidopsisthaliana codon usage bias, is set forth as SEQ ID NO:330 in the SEQUENCE LISTING.

[0221] The 372 position of the SIHPPD amino acid sequence was mutated from the original phenylalanine to glycine, to obtain the mutated SlHPPD (SlHPPDm-F372G) amino acid sequence as set forth in SEQ ID NO:331 in the SEQUENCE LISTING, and the SlHPPDm-F372G nucleotide sequence encoding the SlHPPDm-F372G, which was obtained based on the Arabidopsisthaliana codon usage bias, is set forth as SEQ ID NO:332 in the SEQUENCE LISTING.

[0222] The 372 position of the AhHPPD amino acid sequence was mutated from the original phenylalanine to glycine, to obtain the mutated AhHPPD (AhHPPDm-F372G) amino acid sequence as set forth in SEQ ID NO:333 in the SEQUENCE LISTING, and the AhHPPDm-F372G nucleotide sequence encoding the AhHPPDm-F372G, which was obtained based on the Arabidopsisthaliana codon usage bias, is set forth as SEQ ID NO:334 in the SEQUENCE LISTING.

[0223] The 372 position of the CyHPPD amino acid sequence was mutated from the original phenylalanine to glycine, to obtain the mutated CyHPPD (CyHPPDm-F372G) amino acid sequence as set forth in SEQ ID NO:335 in the SEQUENCE LISTING, and the CyHPPDm-F372G nucleotide sequence encoding the CyHPPDm-F372G, which was obtained based on the Arabidopsisthaliana codon usage bias, is set forth as SEQ ID NO:336 in the SEQUENCE LISTING.

[0224] The 372 position of the N1HPPD amino acid sequence was mutated from the original phenylalanine to glycine, to obtain the mutated N1HPPD (N1HPPDm-F372G) amino acid sequence as set forth in SEQ ID NO:337 in the SEQUENCE LISTING, and the N1HPPDm-F372G nucleotide sequence encoding the N1HPPDm-F372G, which was obtained based on the Arabidopsisthaliana codon usage bias, is set forth as SEQ ID NO:338 in the SEQUENCE LISTING.

[0225] The 372 position of the N2HPPD amino acid sequence was mutated from the original phenylalanine to glycine, to obtain the mutated N2HPPD (N2HPPDm-F372G) amino acid sequence as set forth in SEQ ID NO:339 in the SEQUENCE LISTING, and the N2HPPDm-F372G nucleotide sequence encoding the N2HPPDm-F372G, which was obtained based on the Arabidopsisthaliana codon usage bias, is set forth as SEQ ID NO:340 in the SEQUENCE LISTING.

[0226] The 372 position of the N3HPPD amino acid sequence was mutated from the original phenylalanine to glycine, to obtain the mutated N3HPPD (N3HPPDm-F372G) amino acid sequence as set forth in SEQ ID NO:341 in the SEQUENCE LISTING, and the N3HPPDm-F372G nucleotide sequence encoding the N3HPPDm-F372G, which was obtained based on the Arabidopsisthaliana codon usage bias, is set forth as SEQ ID NO:342 in the SEQUENCE LISTING.

[0227] The 372 position of the N4HPPD amino acid sequence was mutated from the original phenylalanine to glycine, to obtain the mutated N4HPPD (N4HPPDm-F372G) amino acid sequence as set forth in SEQ ID NO:343 in the SEQUENCE LISTING, and the N4HPPDm-F372G nucleotide sequence encoding the N4HPPDm-F372G, which was obtained based on the Arabidopsisthaliana codon usage bias, is set forth as SEQ ID NO:344 in the SEQUENCE LISTING.

[0228] The 372 position of the N5HPPD amino acid sequence was mutated from the original phenylalanine to glycine, to obtain the mutated N5HPPD (N5HPPDm-F372G) amino acid sequence as set forth in SEQ ID NO:345 in the SEQUENCE LISTING, and the N5HPPDm-F372G nucleotide sequence encoding the N5HPPDm-F372G, which was obtained based on the Arabidopsisthaliana codon usage bias, is set forth as SEQ ID NO:346 in the SEQUENCE LISTING.

[0229] The 372 position of the ZmHPPD amino acid sequence was mutated from the original phenylalanine to valine, to obtain the mutated ZmHPPD (ZmHPPDm-F372V) amino acid sequence as set forth in SEQ ID NO:347 in the SEQUENCE LISTING, and the ZmHPPDm-F372V nucleotide sequence encoding the ZmHPPDm-F372V, which was obtained based on the Arabidopsisthaliana codon usage bias, is set forth as SEQ ID NO:348 in the SEQUENCE LISTING.

[0230] The 372 position of the AtHPPD amino acid sequence was mutated from the original phenylalanine to valine, to obtain the mutated AtHPPD (AtHPPDm-F372V) amino acid sequence as set forth in SEQ ID NO:349 in the SEQUENCE LISTING, and the AtHPPDm-F372V nucleotide sequence encoding the AtHPPDm-F372V is set forth as SEQ ID NO:350 in the SEQUENCE LISTING.

[0231] The 372 position of the GsHPPD amino acid sequence was mutated from the original phenylalanine to valine, to obtain the mutated GsHPPD (GsHPPDm-F372V) amino acid sequence as set forth in SEQ ID NO:351 in the SEQUENCE LISTING, and the GsHPPDm-F372V nucleotide sequence encoding the GsHPPDm-F372V, which was obtained based on the Arabidopsisthaliana codon usage bias, is set forth as SEQ ID NO:352 in the SEQUENCE LISTING.

[0232] The 372 position of the TaHPPD amino acid sequence was mutated from the original phenylalanine to valine, to obtain the mutated TaHPPD (TaHPPDm-F372V) amino acid sequence as set forth in SEQ ID NO:353 in the SEQUENCE LISTING, and the TaHPPDm-F372V nucleotide sequence encoding the TaHPPDm-F372V, which was obtained based on the Arabidopsisthaliana codon usage bias, is set forth as SEQ ID NO:354 in the SEQUENCE LISTING.

[0233] The 372 position of the BdHPPD amino acid sequence was mutated from the original phenylalanine to valine, to obtain the mutated BdHPPD (BdHPPDm-F372V) amino acid sequence as set forth in SEQ ID NO:355 in the SEQUENCE LISTING, and the BdHPPDm-F372V nucleotide sequence encoding the BdHPPDm-F372V, which was obtained based on the Arabidopsisthaliana codon usage bias, is set forth as SEQ ID NO:356 in the SEQUENCE LISTING.

[0234] The 372 position of the HvHPPD amino acid sequence was mutated from the original phenylalanine to valine, to obtain the mutated HvHPPD (HvHPPDm-F372V) amino acid sequence as set forth in SEQ ID NO:357 in the SEQUENCE LISTING, and the HvHPPDm-F372V nucleotide sequence encoding the HvHPPDm-F372V, which was obtained based on the Arabidopsisthaliana codon usage bias, is set forth as SEQ ID NO:358 in the SEQUENCE LISTING.

[0235] The 372 position of the SiHPPD amino acid sequence was mutated from the original phenylalanine to valine, to obtain the mutated SiHPPD (SiHPPDm-F372V) amino acid sequence as set forth in SEQ ID NO:359 in the SEQUENCE LISTING, and the SiHPPDm-F372V nucleotide sequence encoding the SiHPPDm-F372V, which was obtained based on the Arabidopsisthaliana codon usage bias, is set forth as SEQ ID NO:360 in the SEQUENCE LISTING.

[0236] The 372 position of the SbHPPD amino acid sequence was mutated from the original phenylalanine to valine, to obtain the mutated SbHPPD (SbHPPDm-F372V) amino acid sequence as set forth in SEQ ID NO:361 in the SEQUENCE LISTING, and the SbHPPDm-F372V nucleotide sequence encoding the SbHPPDm-F372V, which was obtained based on the Arabidopsisthaliana codon usage bias, is set forth as SEQ ID NO:362 in the SEQUENCE LISTING.

[0237] The 372 position of the OsHPPD amino acid sequence was mutated from the original phenylalanine to valine, to obtain the mutated OsHPPD (OsHPPDm-F372V) amino acid sequence as set forth in SEQ ID NO:363 in the SEQUENCE LISTING, and the OsHPPDm-F372V nucleotide sequence encoding the OsHPPDm-F372V, which was obtained based on the Arabidopsisthaliana codon usage bias, is set forth as SEQ ID NO:364 in the SEQUENCE LISTING.

[0238] The 372 position of the GmHPPD amino acid sequence was mutated from the original phenylalanine to valine, to obtain the mutated GmHPPD (GmHPPDm-F372V) amino acid sequence as set forth in SEQ ID NO:365 in the SEQUENCE LISTING, and the GmHPPDm-F372V nucleotide sequence encoding the GmHPPDm-F372V, which was obtained based on the Arabidopsisthaliana codon usage bias, is set forth as SEQ ID NO:366 in the SEQUENCE LISTING.

[0239] The 372 position of the CaHPPD amino acid sequence was mutated from the original phenylalanine to valine, to obtain the mutated CaHPPD (CaHPPDm-F372V) amino acid sequence as set forth in SEQ ID NO:367 in the SEQUENCE LISTING, and the CaHPPDm-F372V nucleotide sequence encoding the CaHPPDm-F372V, which was obtained based on the Arabidopsisthaliana codon usage bias, is set forth as SEQ ID NO:368 in the SEQUENCE LISTING.

[0240] The 372 position of the BnHPPD amino acid sequence was mutated from the original phenylalanine to valine, to obtain the mutated BnHPPD (BnHPPDm-F372V) amino acid sequence as set forth in SEQ ID NO:369 in the SEQUENCE LISTING, and the BnHPPDm-F372V nucleotide sequence encoding the BnHPPDm-F372V, which was obtained based on the Arabidopsisthaliana codon usage bias, is set forth as SEQ ID NO:370 in the SEQUENCE LISTING.

[0241] The 372 position of the HaHPPD amino acid sequence was mutated from the original phenylalanine to valine, to obtain the mutated HaHPPD (HaHPPDm-F372V) amino acid sequence as set forth in SEQ ID NO:371 in the SEQUENCE LISTING, and the HaHPPDm-F372V nucleotide sequence encoding the HaHPPDm-F372V, which was obtained based on the Arabidopsisthaliana codon usage bias, is set forth as SEQ ID NO:372 in the SEQUENCE LISTING.

[0242] The 372 position of the MsHPPD amino acid sequence was mutated from the original phenylalanine to valine, to obtain the mutated MsHPPD (MsHPPDm-F372V) amino acid sequence as set forth in SEQ ID NO:373 in the SEQUENCE LISTING, and the MsHPPDm-F372V nucleotide sequence encoding the MsHPPDm-F372V, which was obtained based on the Arabidopsisthaliana codon usage bias, is set forth as SEQ ID NO:374 in the SEQUENCE LISTING.

[0243] The 372 position of the BvHPPD amino acid sequence was mutated from the original phenylalanine to valine, to obtain the mutated BvHPPD (BvHPPDm-F372V) amino acid sequence as set forth in SEQ ID NO:375 in the SEQUENCE LISTING, and the BvHPPDm-F372V nucleotide sequence encoding the BvHPPDm-F372V, which was obtained based on the Arabidopsisthaliana codon usage bias, is set forth as SEQ ID NO:376 in the SEQUENCE LISTING.

[0244] The 372 position of the NtHPPD amino acid sequence was mutated from the original phenylalanine to valine, to obtain the mutated NtHPPD (NtHPPDm-F372V) amino acid sequence as set forth in SEQ ID NO:377 in the SEQUENCE LISTING, and the NtHPPDm-F372V nucleotide sequence encoding the NtHPPDm-F372V, which was obtained based on the Arabidopsisthaliana codon usage bias, is set forth as SEQ ID NO:378 in the SEQUENCE LISTING.

[0245] The 372 position of the CsHPPD amino acid sequence was mutated from the original phenylalanine to valine, to obtain the mutated CsHPPD (CsHPPDm-F372V) amino acid sequence as set forth in SEQ ID NO:379 in the SEQUENCE LISTING, and the CsHPPDm-F372V nucleotide sequence encoding the CsHPPDm-F372V, which was obtained based on the Arabidopsisthaliana codon usage bias, is set forth as SEQ ID NO:380 in the SEQUENCE LISTING.

[0246] The 372 position of the StHPPD amino acid sequence was mutated from the original phenylalanine to valine, to obtain the mutated StHPPD (StHPPDm-F372V) amino acid sequence as set forth in SEQ ID NO:381 in the SEQUENCE LISTING, and the StHPPDm-F372V nucleotide sequence encoding the StHPPDm-F372V, which was obtained based on the Arabidopsisthaliana codon usage bias, is set forth as SEQ ID NO:382 in the SEQUENCE LISTING.

[0247] The 372 position of the S1HPPD amino acid sequence was mutated from the original phenylalanine to valine, to obtain the mutated S1HPPD (S1HPPDm-F372V) amino acid sequence as set forth in SEQ ID NO:383 in the SEQUENCE LISTING, and the S1HPPDm-F372V nucleotide sequence encoding the S1HPPDm-F372V, which was obtained based on the Arabidopsisthaliana codon usage bias, is set forth as SEQ ID NO:384 in the SEQUENCE LISTING.

[0248] The 372 position of the AhHPPD amino acid sequence was mutated from the original phenylalanine to valine, to obtain the mutated AhHPPD (AhHPPDm-F372V) amino acid sequence as set forth in SEQ ID NO:385 in the SEQUENCE LISTING, and the AhHPPDm-F372V nucleotide sequence encoding the AhHPPDm-F372V, which was obtained based on the Arabidopsisthaliana codon usage bias, is set forth as SEQ ID NO:386 in the SEQUENCE LISTING.

[0249] The 372 position of the CyHPPD amino acid sequence was mutated from the original phenylalanine to valine, to obtain the mutated CyHPPD (CyHPPDm-F372V) amino acid sequence as set forth in SEQ ID NO:387 in the SEQUENCE LISTING, and the CyHPPDm-F372V nucleotide sequence encoding the CyHPPDm-F372V, which was obtained based on the Arabidopsisthaliana codon usage bias, is set forth as SEQ ID NO:388 in the SEQUENCE LISTING.

[0250] The 372 position of the N1HPPD amino acid sequence was mutated from the original phenylalanine to valine, to obtain the mutated N1HPPD (N1HPPDm-F372V) amino acid sequence as set forth in SEQ ID NO:389 in the SEQUENCE LISTING, and the N1HPPDm-F372V nucleotide sequence encoding the N1HPPDm-F372V, which was obtained based on the Arabidopsisthaliana codon usage bias, is set forth as SEQ ID NO:390 in the SEQUENCE LISTING.

[0251] The 372 position of the N2HPPD amino acid sequence was mutated from the original phenylalanine to valine, to obtain the mutated N2HPPD (N2HPPDm-F372V) amino acid sequence as set forth in SEQ ID NO:391 in the SEQUENCE LISTING, and the N2HPPDm-F372V nucleotide sequence encoding the N2HPPDm-F372V, which was obtained based on the Arabidopsisthaliana codon usage bias, is set forth as SEQ ID NO:392 in the SEQUENCE LISTING.

[0252] The 372 position of the N3HPPD amino acid sequence was mutated from the original phenylalanine to valine, to obtain the mutated N3HPPD (N3HPPDm-F372V) amino acid sequence as set forth in SEQ ID NO:393 in the SEQUENCE LISTING, and the N3HPPDm-F372V nucleotide sequence encoding the N3HPPDm-F372V, which was obtained based on the Arabidopsisthaliana codon usage bias, is set forth as SEQ ID NO:394 in the SEQUENCE LISTING.

[0253] The 372 position of the N4HPPD amino acid sequence was mutated from the original phenylalanine to valine, to obtain the mutated N4HPPD (N4HPPDm-F372V) amino acid sequence as set forth in SEQ ID NO:395 in the SEQUENCE LISTING, and the N4HPPDm-F372V nucleotide sequence encoding the N4HPPDm-F372V, which was obtained based on the Arabidopsisthaliana codon usage bias, is set forth as SEQ ID NO:396 in the SEQUENCE LISTING.

[0254] The 372 position of the N5HPPD amino acid sequence was mutated from the original phenylalanine to valine, to obtain the mutated N5HPPD (N5HPPDm-F372V) amino acid sequence as set forth in SEQ ID NO:397 in the SEQUENCE LISTING, and the N5HPPDm-F372V nucleotide sequence encoding the N5HPPDm-F372V, which was obtained based on the Arabidopsisthaliana codon usage bias, is set forth as SEQ ID NO:398 in the SEQUENCE LISTING.

### 2. Construction of the Recombinant Expression Vectors Containing Mutated HPPD (F372G and F372V) from Different Species Sources for Arabidopsis Thaliana

[0255] According to the method of constructing the recombinant expression vector DBN11375 containing AsHPPDm-F372A-02 nucleotide sequence as described in point 3 of Example 1, the ZmHPPDm-F372G nucleotide sequence, AtHPPDm-F372G nucleotide sequence, GsHPPDm-F372G nucleotide sequence, TaHPPDm-F372G nucleotide sequence, BdHPPDm-F372G nucleotide sequence, HvHPPDm-F372G nucleotide sequence, SiHPPDm-F372G nucleotide sequence, SbHPPDm-F372G nucleotide sequence, OsHPPDm-F372G nucleotide sequence, GmHPPDm-F372G nucleotide sequence, CaHPPDm-F372G nucleotide sequence, BnHPPDm-F372G nucleotide sequence, HaHPPDm-F372G nucleotide sequence, MsHPPDm-F372G nucleotide sequence, BvHPPDm-F372G nucleotide sequence, NtHPPDm-F372G nucleotide sequence, CsHPPDm-F372G nucleotide sequence, StHPPDm-F372G nucleotide sequence, S1HPPDm-F372G nucleotide sequence, AhHPPDm-F372G nucleotide sequence, CyHPPDm-F372G nucleotide sequence, N1HPPDm-F372G nucleotide sequence, N2HPPDm-F372G nucleotide sequence, N3HPPDm-F372G nucleotide sequence, N4HPPDm-F372G nucleotide sequence and N5HPPDm-F372G nucleotide sequence which were linked with the universal adapter primer 1 were respectively subjected to a recombination reaction with the linearized DBNBC-01 expression vector skeleton to obtain the recombinant expression vectors DBN11448 to DBN11473 in sequence. Sequencing verified that the above nucleotide sequences were correctly inserted in the recombinant expression vectors DBN11448 to DBN11473.

[0256] According to the method of constructing the recombinant expression vector DBN11375 containing AsHPPDm-F372A-02 nucleotide sequence as described in point 3 of Example 1, the ZmHPPDm-F372V nucleotide sequence, AtHPPDm-F372V nucleotide sequence, GsHPPDm-F372V nucleotide sequence, TaHPPDm-F372V nucleotide sequence, BdHPPDm-F372V nucleotide sequence, HvHPPDm-F372V nucleotide sequence, SiHPPDm-F372V nucleotide sequence, SbHPPDm-F372V nucleotide sequence, OsHPPDm-F372V nucleotide sequence, GmHPPDm-F372V nucleotide sequence, CaHPPDm-F372V nucleotide sequence, BnHPPDm-F372V nucleotide sequence, HaHPPDm-F372V nucleotide sequence, MsHPPDm-F372V nucleotide sequence, BvHPPDm-F372V nucleotide sequence, NtHPPDm-F372V nucleotide sequence, CsHPPDm-F372V nucleotide sequence, StHPPDm-F372V nucleotide sequence, S1HPPDm-F372V nucleotide sequence, AhHPPDm-F372V nucleotide sequence, CyHPPDm-F372V nucleotide sequence, N1HPPDm-F372V nucleotide sequence, N2HPPDm-F372V nucleotide sequence, N3HPPDm-F372V nucleotide sequence, N4HPPDm-F372V nucleotide sequence and N5HPPDm-F372V nucleotide sequence which were linked with the universal adapter primer 1 were respectively subjected to a recombination reaction with the linearized DBNBC-01 expression vector skeleton to obtain the recombinant expression vectors DBN11474 to DBN11499 in sequence. Sequencing verified that the above nucleotide sequences were correctly inserted in the recombinant expression vectors DBN11474 to DBN11499.

### 3. Transformation of Agrobacterium with the Recombinant Expression Vectors for Arabidopsis Thaliana

[0257] According to the method of transformation of Agrobacterium with the recombinant expression vectors for Arabidopsis thaliana as described in point 4 of Example 1, the recombinant expression vectors DBN11448 to DBN11499 which had been correctly constructed were transformed into the Agrobacterium GV3101 respectively using a liquid nitrogen method, and the results were verified by sequencing, showing that the structures of the recombinant expression vectors DBN11448 to DBN11499 were completely correct.

### 4. Detection of the Herbicide Tolerance Effects of Arabidopsis Thaliana Plants into Which Mutated HPPD (F372G and F372V) from Different Species Sources was Introduced

[0258] According to the method as described in point 5 of Example 1, the Arabidopsisthaliana inflorescences were immersed in the Agrobacterium solution as described in Example 3, so as to introduce the T-DNA of the recombinant expression vectors DBN11448 to DBN11499 constructed in Example 2 into the Arabidopsisthaliana chromosome, thereby obtaining the corresponding transgenic Arabidopsisthaliana plants, that is, the Arabidopsisthaliana T₁ plants into which the ZmHPPDm-F372G nucleotide sequence was introduced, Arabidopsisthaliana T₁ plants into which the AtHPPDm-F372G nucleotide sequence was introduced, Arabidopsisthaliana T₁ plants into which the GsHPPDm-F372G nucleotide sequence was introduced, Arabidopsisthaliana T₁ plants into which the TaHPPDm-F372G nucleotide sequence was introduced, Arabidopsisthaliana T₁ plants into which the BdHPPDm-F372G nucleotide sequence was introduced, Arabidopsisthaliana T₁ plants into which the HvHPPDm-F372G nucleotide sequence was introduced, Arabidopsisthaliana T₁ plants into which the SiHPPDm-F372G nucleotide sequence was introduced, Arabidopsisthaliana T₁ plants into which the SbHPPDm-F372G nucleotide sequence was introduced, Arabidopsisthaliana T₁ plants into which the OsHPPDm-F372G nucleotide sequence was introduced, Arabidopsisthaliana T₁ plants into which the GmHPPDm-F372G nucleotide sequence was introduced, Arabidopsisthaliana T₁ plants into which the CaHPPDm-F372G nucleotide sequence was introduced, Arabidopsisthaliana T₁ plants into which the BnHPPDm-F372G nucleotide sequence was introduced, Arabidopsisthaliana T₁ plants into which the HaHPPDm-F372G nucleotide sequence was introduced, Arabidopsisthaliana T₁ plants into which the MsHPPDm-F372G nucleotide sequence was introduced, Arabidopsisthaliana T₁ plants into which the BvHPPDm-F372G nucleotide sequence was introduced, Arabidopsisthaliana T₁ plants into which the NtHPPDm-F372G nucleotide sequence was introduced, Arabidopsisthaliana T₁ plants into which the CsHPPDm-F372G nucleotide sequence was introduced, Arabidopsisthaliana T₁ plants into which the StHPPDm-F372G nucleotide sequence was introduced, Arabidopsisthaliana T₁ plants into which the S1HPPDm-F372G nucleotide sequence was introduced, Arabidopsisthaliana T₁ plants into which the AhHPPDm-F372G nucleotide sequence was introduced, Arabidopsisthaliana T₁ plants into which the CyHPPDm-F372G nucleotide sequence was introduced, Arabidopsisthaliana T₁ plants into which the N1HPPDm-F372G nucleotide sequence was introduced, Arabidopsisthaliana T₁ plants into which the N2HPPDm-F372G nucleotide sequence was introduced, Arabidopsisthaliana T₁ plants into which the N3HPPDm-F372G nucleotide sequence was introduced, Arabidopsisthaliana T₁ plants into which the N4HPPDm-F372G nucleotide sequence was introduced, Arabidopsisthaliana T₁ plants into which the N5HPPDm-F372G nucleotide sequence was introduced, and Arabidopsisthaliana T₁ plants into which the ZmHPPDm-F372V nucleotide sequence was introduced, Arabidopsisthaliana T₁ plants into which the AtHPPDm-F372V nucleotide sequence was introduced, Arabidopsisthaliana T₁ plants into which the GsHPPDm-F372V nucleotide sequence was introduced, Arabidopsisthaliana T₁ plants into which the TaHPPDm-F372V nucleotide sequence was introduced, Arabidopsisthaliana T₁ plants into which the BdHPPDm-F372V nucleotide sequence was introduced, Arabidopsisthaliana T₁ plants into which the HvHPPDm-F372V nucleotide sequence was introduced, Arabidopsisthaliana T₁ plants into which the SiHPPDm-F372V nucleotide sequence was introduced, Arabidopsisthaliana T₁ plants into which the SbHPPDm-F372V nucleotide sequence was introduced, Arabidopsisthaliana T₁ plants into which the OsHPPDm-F372V nucleotide sequence was introduced, Arabidopsisthaliana T₁ plants into which the GmHPPDm-F372V nucleotide sequence was introduced, Arabidopsisthaliana T₁ plants into which the CaHPPDm-F372V nucleotide sequence was introduced, Arabidopsisthaliana T₁ plants into which the BnHPPDm-F372V nucleotide sequence was introduced, Arabidopsisthaliana T₁ plants into which the HaHPPDm-F372V nucleotide sequence was introduced, Arabidopsisthaliana T₁ plants into which the MsHPPDm-F372V nucleotide sequence was introduced, Arabidopsisthaliana T₁ plants into which the BvHPPDm-F372V nucleotide sequence was introduced, Arabidopsisthaliana T₁ plants into which the NtHPPDm-F372V nucleotide sequence was introduced, Arabidopsisthaliana T₁ plants into which the CsHPPDm-F372V nucleotide sequence was introduced, Arabidopsisthaliana T₁ plants into which the StHPPDm-F372V nucleotide sequence was introduced, Arabidopsisthaliana T₁ plants into which the S1HPPDm-F372V nucleotide sequence was introduced, Arabidopsisthaliana T₁ plants into which the AhHPPDm-F372V nucleotide sequence was introduced, Arabidopsisthaliana T₁ plants into which the CyHPPDm-F372V nucleotide sequence was introduced, Arabidopsisthaliana T₁ plants into which the N1HPPDm-F372V nucleotide sequence was introduced, Arabidopsisthaliana T₁ plants into which the N2HPPDm-F372V nucleotide sequence was introduced, Arabidopsisthaliana T₁ plants into which the N3HPPDm-F372V nucleotide sequence was introduced, Arabidopsisthaliana T₁ plants into which the N4HPPDm-F372V nucleotide sequence was introduced, and Arabidopsisthaliana T₁ plants into which the N5HPPDm-F372V nucleotide sequence was introduced.

[0259] According to the method as described in point 6 of Example 1, the above-mentioned Arabidopsisthaliana T₁ plants and wild-type Arabidopsisthaliana plants (18 days after sowing) were sprayed with topramezone at two different concentrations respectively, that is, 25 g ai/ha (one-fold field concentration, 1x) and 100 g ai/ha (four-fold field concentration, 4x) to detect the herbicide tolerance of Arabidopsisthaliana,. The experimental results are shown in TABLEs 6 and 7.

TABLE 6

Topramezone tolerance of Arabidopsis thaliana T₁ plants into which mutated HPPD (F372G) from different species sources was introduced

| Source of the gene | Arabidopsis thaliana genotype | Concentration (g ai/ha) | Resistance evaluation |
|---|---|---|---|
| | Wild-type Arabidopsis thaliana | 25 | Non-resistant |
| | | 100 | Non-resistant |
| Zea mays | ZmHPPDm-F372G | 25 | Highly resistant |
| | | 100 | Moderately resistant |
| Gossypium hirsutum | GsHPPDm-F372G | 25 | Moderately resistant |
| | | 100 | Non-resistant |
| Triticum aestivum | TaHPPDm-F372G | 25 | Highly resistant |
| | | 100 | Moderately resistant |
| Brachypodium distachyon | BdHPPDm-F372G | 25 | Highly resistant |
| | | 100 | Moderately resistant |
| Hordeum vulgare | HvHPPDm-F372G | 25 | Highly resistant |
| | | 100 | Poorly resistant |
| Setaria italica | SiHPPDm-F372G | 25 | Moderately resistant |
| | | 100 | Poorly resistant |
| Sorghum bicolor | SbHPPDm-F372G | 25 | Moderately resistant |
| | | 100 | Non-resistant |
| Oryza sativa | OsHPPDm-F372G | 25 | Moderately resistant |
| | | 100 | Non-resistant |
| Arabidopsis thaliana | AtHPPDm-F372G | 25 | Poorly resistant |
| | | 100 | Non-resistant |
| Glycine max | GmHPPDm-F372G | 25 | Poorly resistant |
| | | 100 | Non-resistant |
| Cicer arielinum | CaHPPDm-F372G | 25 | Poorly resistant |
| | | 100 | Non-resistant |
| Brassica napus | BnHPPDm-F372G | 25 | Poorly resistant |
| | | 100 | Non-resistant |
| Helianthus anuuus | HaHPPDm-F372G | 25 | Poorly resistant |
| | | 100 | Non-resistant |
| Medicago sativa | MsHPPDm-F372G | 25 | Moderately resistant |
| | | 100 | Non-resistant |
| Beta vulgaris | BvHPPDm-F372G | 25 | Moderately resistant |
| | | 100 | Non-resistant |
| Nicotiana tabacum | NtHPPDm-F372G | 25 | Poorly resistant |
| | | 100 | Non-resistant |
| Cucumis sativus | CsHPPDm-F372G | 25 | Poorly resistant |
| | | 100 | Non-resistant |
| Solanum tuberosum | StHPPDm-F372G | 25 | Poorly resistant |
| | | 100 | Non-resistant |
| Solanum lycopersicum | SlHPPDm-F372G | 25 | Poorly resistant |
| | | 100 | Non-resistant |
| Arachis hypogaea | AhHPPDm-F372G | 25 | Poorly resistant |
| | | 100 | Non-resistant |
| Cyanobacteria | CyHPPDm-F372G | 25 | Moderately resistant |
| | | 100 | Non-resistant |
| N1 | N1HPPDm-F372G | 25 | Highly resistant |
| | | 100 | Highly resistant |
| N2 | N2HPPDm-F372G | 25 | Highly resistant |
| | | 100 | Highly resistant |
| N3 | N3HPPDm-F372G | 25 | Highly resistant |
| | | 100 | Highly resistant |
| N4 | N4HPPDm-F372G | 25 | Highly resistant |
| | | 100 | Highly resistant |
| N5 | N4HPPDm-F372G | 25 | Highly resistant |
| | | 100 | Highly resistant |

TABLE 7

Topramezone tolerance of Arabidopsis thaliana T₁ plants into which mutated HPPD (F372V) from different species sources was introduced

| Source of the gene | Arabidopsis thaliana genotype | Concentration (g ai/ha) | Resistance evaluation |
|---|---|---|---|
| | Wild-type Arabidopsis thaliana | 25 | Non-resistant |
| | | 100 | Non-resistant |
| Zea mays | ZmHPPDm-F372V | 25 | Highly resistant |
| | | 100 | Poorly resistant |
| Gossypium hirsutum | GsHPPDm-F372V | 25 | Moderately resistant |
| | | 100 | Non-resistant |
| Triticum aestivum | TaHPPDm-F372V | 25 | Highly resistant |
| | | 100 | Moderately resistant |
| Brachypodium dislachyon | BdHPPDm-F372V | 25 | Highly resistant |
| | | 100 | Poorly resistant |
| Hordeum vulgare | HvHPPDm-F372V | 25 | Highly resistant |
| | | 100 | Poorly resistant |
| Setaria italica | SiHPPDm-F372V | 25 | Moderately resistant |
| | | 100 | Poorly resistant |
| Sorghum bicolor | SbHPPDm-F372V | 25 | Poorly resistant |
| | | 100 | Non-resistant |
| Oryza sativa | OsHPPDm-F372V | 25 | Moderately resistant |
| | | 100 | Non-resistant |
| Arabidopsis thaliana | AtHPPDm-F372V | 25 | Poorly resistant |
| | | 100 | Non-resistant |
| Glycine max | GmHPPDm-F372V | 25 | Poorly resistant |
| | | 100 | Non-resistant |
| Cicer artietinum | CaHPPDm-F372V | 25 | Poorly resistant |
| | | 100 | Non-resistant |
| Brassica napus | BnHPPDm-F372V | 25 | Poorly resistant |
| | | 100 | Non-resistant |
| Helianthus annuus | HaHPPDm-F372V | 25 | Poorly resistant |
| | | 100 | Non-resistant |
| Medicago sativa | MsHPPDm-F372V | 25 | Poorly resistant |
| | | 100 | Non-resistant |
| Beta vulgaris | BvHPPDm-F372V | 25 | Poorly resistant |
| | | 100 | Non-resistant |
| Nicotiana tabacum | NtHPPDm-F372V | 25 | Poorly resistant |
| | | 100 | Non-resistant |
| Cucumis sativus | CsHPPDm-F372V | 25 | Poorly resistant |
| | | 100 | Non-resistant |
| Solatium tuberosturt | StHPPDm-F372V | 25 | Poorly resistant |
| | | 100 | Non-resistant |
| Solanum lycopersicum | SlHPPDm-F372V | 25 | Poorly resistant |
| | | 100 | Non-resistant |
| Arachis hypogaea | AhHPPDm-F372V | 25 | Poorly resistant |
| | | 100 | Non-resistant |
| Cyanobacteria | CyHPPDm-F372V | 25 | Poorly resistant |
| | | 100 | Non-resistant |
| N1 | N1HPPDm-F372V | 25 | Highly resistant |
| | | 100 | Highly resistant |
| N2 | N2HPPDm-F372V | 25 | Highly resistant |
| | | 100 | Highly resistant |
| N3 | N3HPPDm-F372V | 25 | Highly resistant |
| | | 100 | Highly resistant |
| N4 | N4HPPDm-F372V | 25 | Highly resistant |
| | | 100 | Highly resistant |
| N5 | N5HPPDm-F372V | 25 | Highly resistant |
| | | 100 | Highly resistant |

[0260] The results in TABLEs 6 and 7 showed that: as compared with the Arabidopsisthaliana plants into which unmutated HPPD gene was introduced in Example 2 and the wild-type Arabidopsisthaliana plants, the Arabidopsisthaliana plants into which the mutation (F372G or F372V) at 372 position of HPPD gene from different species sources was introduced had different degrees of tolerance to topramezone, and especially the Arabidopsisthaliana plants into which the mutation at 372 position of HPPD gene from the microorganism source was introduced had better tolerance to topramezone. Therefore, the mutation (F372G or F372V) at 372 position of HPPD amino acid sequence from different species sources can confer tolerance to topramezone upon plants.

### Example 6: Combination of Mutation of the 372 Position With That of Other Position in the HPPD Amino Acid Sequence and the Mutation Effect Thereof

### 1. Acquisition of the Sequence with Mutation Combination

[0261] The 372 position of the AsHPPD amino acid sequence was mutated from the original phenylalanine (F) to alanine (A), and deletion mutation was performed upon the alanine (A) at the 110 position, to obtain the mutated AsHPPD (AsHPPDm-F372A-A110) amino acid sequence as set forth in SEQ ID NO:412 in the SEQUENCE LISTING; the AsHPPDm-F372A-A110 nucleotide sequence encoding the above amino acid sequence, which was obtained based on the Arabidopsisthaliana /soybean/rice common codon usage bias, is set forth in SEQ ID NO:413 in the SEQUENCE LISTING.

[0262] Deletion mutation was performed upon the alanine (A) at the position 110 of the AsHPPD amino acid sequence, to obtain the mutated AsHPPD (AsHPPDm-A110) amino acid sequence as set forth in SEQ ID NO:414 in the SEQUENCE LISTING; the AsHPPDm-A110 nucleotide sequence encoding the above amino acid sequence, which was obtained based on the Arabidopsisthaliana/soybean/rice common codon usage bias, is set forth in SEQ ID NO:415 in the SEQUENCE LISTING.

[0263] The 372 position of the PfHPPD amino acid sequence was mutated from the original phenylalanine (F) to alanine (A), and the 336 position (corresponding to the 413 position of the amino acid sequence as set forth in SEQ ID NO:1, that is, 413 position) was mutated from the original glycine (G) to tryptophan (W), to obtain the mutated PfHPPD (PfHPPDm-F372A-G413W) amino acid sequence as set forth in SEQ ID NO:416 in the SEQUENCE LISTING; the PfHPPDm-F372A-G413 W nucleotide sequence encoding the above amino acid sequence, which was obtained based on the Arabidopsisthaliona/soybean/rice common codon usage bias, is set forth in SEQ ID NO:417 in the SEQUENCE LISTING.

[0264] The 336 position of the PfHPPD amino acid sequence (corresponding to the 413 position of the amino acid sequence as set forth in SEQ ID NO:1, that is, 413 position) was mutated from the original glycine (G) to tryptophan (W), to obtain the mutated PfHPPD (PfHPPDm-G413W) amino acid sequence as set forth in SEQ ID NO:418 in the SEQUENCE LISTING; the PfHPPDm-G413W nucleotide sequence encoding the above amino acid sequence, which was obtained based on the Arabidopsisthaliana/soybean/rice common codon usage bias, is set forth in SEQ ID NO:419 in the SEQUENCE LISTING.

### 2. Construction of the Recombinant Expression Vectors Containing the Mutation Combination of HPPD for Arabidopsis Thaliana

[0265] According to the method of constructing the recombinant expression vector DBN11375 containing AsHPPDm-F372A-02 nucleotide sequence as described in point 3 of Example 1, the AsHPPDm-F372A-A110 nucleotide sequence, AsHPPDm-A110 nucleotide sequence, PfHPPDm-F372A-G413W nucleotide sequence and PfHPPDm-G413W nucleotide sequence which were linked with the universal adapter primer 1 were respectively subjected to a recombination reaction with the linearized DBNBC-01 expression vector skeleton, to obtain the recombinant expression vectors DBN11500 to DBN11503 in sequence. Sequencing verified that the above nucleotide sequences were correctly inserted in the recombinant expression vectors DBN11500 to DBN11503.

### 3. Transformation of Agrobacterium With the Recombinant Expression Vectors for Arabidopsis Thaliana

[0266] According to the method of transformation of Agrobacterium with the recombinant expression vectors for Arabidopsisthaliana as described in point 4 of Example 1, the recombinant expression vectors DBN11500 to DBN11503 which had been correctly constructed were transformed into the Agrobacterium GV3101 respectively using a liquid nitrogen method. The results were verified by sequencing, showing that the structures of the recombinant expression vectors DBN11500 to DBN11503 were completely correct.

### 4. Detection of the Herbicide Tolerance of the Arabidopsis Thaliana Plants into Which Mutation Combination of HPPD was Introduced

[0267] According to the method as described in point 5 of Example 1, the Arabidopsisthaliana inflorescences were immersed in the Agrobacterium solution as described in Example 3, so as to introduce the T-DNA of the recombinant expression vectors DBN11500 to DBN11503 constructed in Example 2, the recombinant expression vectors DBN11375 to DBN11375N constructed in point 3 of Example 1, and the recombinant expression vectors DBN11378 to DBN11378N constructed in point 2 of Example 2, into Arabidopsisthaliana chromosome, thereby obtaining the corresponding transgenic Arabidopsisthaliana plants, that is, the Arabidopsisthaliana T₁ plants into which the AsHPPDm-F372A-A110 nucleotide sequence was introduced, Arabidopsisthaliana T₁ plants into which the AsHPPDm-AH110 nucleotide sequence was introduced, Arabidopsisthaliana T₁ plants into which the PfHPPDm-F372A-G413W nucleotide sequence was introduced, Arabidopsisthaliana T₁ plants into which the PfHPPDm-G413W nucleotide sequence was introduced, Arabidopsisthaliana T₁ plants into which the AsHPPDm-F372A-02 nucleotide sequence was introduced, Arabidopsisthaliana T₁ plants into which the PfHPPDm-F372A-02 nucleotide sequence was introduced, Arabidopsisthaliana T₁ plants into which the AsHPPDm-02 nucleotide sequence was introduced and Arabidopsisthaliana Ti plants into which the PfHPPDm-02 nucleotide sequence was introduced.

[0268] According to the method as described in point 6 of Example 1, the Arabidopsisthaliana T₁ plants into which the AsHPPDm-F372A-A110 nucleotide sequence was introduced, Arabidopsisthaliana T₁ plants into which the PfHPPDm-F372A-G413W nucleotide sequence was introduced, Arabidopsisthaliana T₁ plants into which the PfHPPDm-G413W nucleotide sequence was introduced, Arabidopsisthaliana T₁ plants into which the AsHPPDm-F372A-02 nucleotide sequence was introduced, Arabidopsisthaliana T₁ plants into which the PfHPPDm-F372A-02 nucleotide sequence was introduced, Arabidopsisthaliana T₁ plants into which the AsHPPDm-02 nucleotide sequence was introduced, Arabidopsisthaliana T₁ plants into which the PfHPPDm-02 nucleotide sequence was introduced and wild-type Arabidopsisthaliana plants (18 days after sowing) were sprayed with topramezone at three different concentrations respectively, that is, 25 g ai/ha (one-fold field concentration, 1x), 100 g ai/ha (four-fold field concentration, 4x) and 0 g ai/ha (water, 0x) to detect the herbicide tolerance of Arabidopsisthaliana. The experimental results are shown in TABLE 8.

TABLE 8

Topramezone tolerance of Arabidopsis thaliana T₁ plants into which the mutation combination of HPPD was introduced

| HPPD mutation type | Treatment concentration (g ai/ha) | Grade 0 | Grade 1 | Grade 2 | Grade 3 | Score | Resistance Grade |
|---|---|---|---|---|---|---|---|
| AsHPPDm-F372A-A110 | 0 | 20 | 0 | 0 | 0 | 0 | |
| | 25 | 20 | 0 | 0 | 0 | 0 | Highly resistant |
| | 100 | 20 | 0 | 0 | 0 | 0 | Highly resistant |
| AsHPPDm-F372A-02 | 0 | 20 | 0 | 0 | 0 | 0 | |
| | 25 | 20 | 0 | 0 | 0 | 0 | Highly resistant |
| | 100 | 20 | 0 | 0 | 0 | 0 | Highly resistant |
| AsHPPDm-A110 | 0 | 20 | 0 | 0 | 0 | 0 | |
| | 25 | 4 | 16 | 0 | 0 | 27 | Moderately resistant |
| | 100 | 0 | 0 | 14 | 6 | 77 | Non-resistant |
| AsHPPD-02 | 0 | 20 | 0 | 0 | 0 | 0 | |
| | 25 | 2 | 2 | 16 | 0 | 57 | Poorly resistant |
| | 100 | 0 | 0 | 4 | 16 | 93 | Non-resistant |
| PfHPPDm-F372A-G413W | 0 | 20 | 0 | 0 | 0 | 0 | |
| | 25 | 20 | 0 | 0 | 0 | 0 | Highly resistant |
| | 100 | 20 | 0 | 0 | 0 | 0 | Highly resistant |
| PfHPPDm-F372A-02 | 0 | 20 | 0 | 0 | 0 | 0 | |
| | 25 | 20 | 0 | 0 | 0 | 0 | Highly resistant |
| | 100 | 16 | 4 | 0 | 0 | 7 | Highly resistant |
| PfHPPDm-G413W | 0 | 20 | 0 | 0 | 0 | 0 | |
| | 25 | 2 | 18 | 0 | 0 | 30 | Moderately resistant |
| | 100 | 0 | 0 | 10 | 10 | 83 | Non-resistant |
| PfHPPD-02 | 0 | 20 | 0 | 0 | 0 | 0 | |
| | 25 | 0 | 0 | 0 | 20 | 100 | Non-resistant |
| | 100 | 0 | 0 | 0 | 20 | 100 | Non-resistant |
| Wild-type Arabidopsis thaliana | 0 | 20 | 0 | 0 | 0 | | |
| | 25 | 0 | 0 | 0 | 20 | 100 | Non-resistant |
| | 100 | 0 | 0 | 0 | 20 | 100 | Non-resistant |

[0269] The results in TABLE 8 showed that: (1) compared with wild-type Arabidopsisthaliana plants and the Arabidopsisthaliana T₁ plants into which AsHPPDm-02 nucleotide sequence was introduced, the Arabidopsisthaliana T₁ plants into which AsHPPDm-F372A-Al 10 nucleotide sequence was introduced, Arabidopsisthaliana T₁ plants into which PfHPPDm-F372A-G413W nucleotide sequence was introduced, Arabidopsisthaliana T₁ plants into which AsHPPDm-F372A-02 nucleotide sequence was introduced and Arabidopsisthaliana T₁ plants into which PfHPPDm-F372A-02 nucleotide sequence was introduced had better tolerance to topramezone (highly resistant); (2) compared with the Arabidopsisthaliana T₁ plants into which the AsHPPDm-02 nucleotide sequence was introduced, the Arabidopsisthaliana T₁ plants into which the AsHPPDm-A110 nucleotide sequence was introduced had a certain tolerance to low concentration of topramezone, but the tolerance was significantly lower than that of the Arabidopsisthaliana T₁ plants into which the AsHPPDm-F372A-A110 nucleotide sequence was introduced and the Arabidopsisthaliana T₁ plants into which the AsHPPDm-F372A-02 nucleotide sequence was introduced; (3) compared with the Arabidopsisthaliana T₁ plants into which the PfHPPDm-02 nucleotide sequence was introduced, the Arabidopsisthaliana T₁ plants into which the PfHPPDm-G413W nucleotide sequence was introduced had a certain tolerance to low concentration of topramezone, but the tolerance was significantly lower than that of the Arabidopsisthaliana T₁ plants into which the PfHPPDm-F372A-G413W nucleotide sequence was introduced and the Arabidopsisthaliana T₁ plants into which the PfHPPDm-F372A-02 nucleotide sequence was introduced. It can be seen that the combination of the mutations at 372 position and at other positions of the HPPD amino acid sequence did not affect the tolerance of the single mutation at 372 position to topramezone, indicating that the mutation at 372 position of the HPPD amino acid sequence conferred the plants with the importance and stability of the tolerance to topramezone.

### Example 7: Mutation of Other Positions (non-372 Positions) of AsHPPD Amino Acid Sequence and Verification of the Mutation Effect

### 1. Acquisition of Mutant Genes at Other Positions of AsHPPD Amino Acid Sequence (Non-Position 372)

[0270] The 284 position (corresponding to the 284 position of the amino acid sequence as set forth in SEQ ID NO: 1, i.e. the 284 position) of the AsHPPD amino acid sequence was mutated from the original glutamine (Q) to alanine (A), to obtain the mutant AsHPPD (AsHPPDm-Q284A) amino acid sequence as set forth in SEQ ID NO: 420 in the SEQUENCE LISTING. The AsHPPDm-Q284A nucleotide sequence encoding the above amino acid sequence, which was obtained based on the Arabidopsisthaliana/soybean/rice common codon usage bias, is set forth in SEQ ID NO: 421 in the SEQUENCE LISTING.

[0271] The 359 position (corresponding to the 359 position of the amino acid sequence as set forth in SEQ ID NO: 1, i.e. the 359 position) of the AsHPPD amino acid sequence was mutated from the original leucine (L) to tryptophan (W), to obtain the mutant AsHPPD (AsHPPDm-L359W) amino acid sequence as set forth in SEQ ID NO: 422 in the SEQUENCE LISTING. The AsHPPDm-L359W nucleotide sequence encoding the above amino acid sequence, which was obtained based on the Arabidopsisthaliana/soybean/rice common codon usage bias, is set forth in SEQ ID NO: 423 in the SEQUENCE LISTING.

[0272] The 415 position (corresponding to the 415 position of the amino acid sequence as set forth in SEQ ID NO: 1, i.e. the 415 position) of the AsHPPD amino acid sequence was mutated from the original phenylalanine (F) to alanine (A), to obtain the mutant AsHPPD (AsHPPDm-F415A) amino acid sequence as set forth in SEQ ID NO: 424 in the SEQUENCE LISTING. The AsHPPDm-F415A nucleotide sequence encoding the above amino acid sequence, which was obtained based on the Arabidopsisthaliana/soybean/rice common codon usage bias, is set forth in SEQ ID NO: 425 in the SEQUENCE LISTING.

### 2. Construction of the Recombinant Expression Vectors Containing HPPD Gene Mutated at Other Positions (Non-Position 372) for Arabidopsis Thaliana

[0273] According to the method of constructing the recombinant expression vector DBN11375 containing the AsHPPDm-F372A-02 nucleotide sequence as described in point 3 of Example 1, the AsHPPDm-Q284A nucleotide sequence, AsHPPDm-L359W nucleotide sequence and AsHPPDm-F415A nucleotide sequence which were linked to the universal adapter primer 1 were respectively subjected to a recombination reaction with the linearized DBNBC-01 expression vector backbone, to obtain the recombinant expression vectors DBN11504, DBN11505 and DBN1 1506 in sequence. Sequencing verified that the above nucleotide sequences were correctly inserted in the recombinant expression vectors DBN11504, DBN11505 and DBN11506.

### 3. Transformation of Agrobacterium with the Recombinant Expression Vectors for Arabidopsis Thaliana

[0274] According to the method of transformation of Agrobacterium with the recombinant expression vectors for Arabidopsisthaliana as described in point 4 of Example 1, the recombinant expression vectors DBN11504, DBN11505 and DBN11506 which had been correctly constructed were transformed into the Agrobacterium GV3101 respectively using a liquid nitrogen method. The results were verified by sequencing, showing that the structures of the recombinant expression vectors DBN11504, DBN11505 and DBN11506 were completely correct.

### 4. Detection of the Herbicide Tolerance of the Arabidopsis Thaliana Plants Into Which the Mutation at Other Positions (Non-Position 372) of the HPPD Gene was Introduced

[0275] According to the method as described in point 5 of Example 1, the Arabidopsisthaliana inflorescences were soaked in the Agrobacterium solution of Example 3, so as to transform the T-DNA of the recombinant expression vectors DBN11504, DBN11505 and DBN11506 into the Arabidopsisthaliana chromosome, thereby obtaining the corresponding transgenic Arabidopsisthaliana plants, i.e. Arabidopsisthaliana T₁ plants into which the AsHPPDm-Q284A nucleotide sequence was introduced, Arabidopsisthaliana T₁ plants into which the AsHPPDm-L359W was introduced and Arabidopsisthaliana T₁ plants into which the AsHPPDm-F415A nucleotide sequence was introduced.

[0276] According to the method as described in point 6 of Example l,the Arabidopsisthaliana Ti plants into which the AsHPPDm-Q284A nucleotide sequence was introduced, Arabidopsisthaliana T₁ plants into which the AsHPPDm-L359W nucleotide sequence was introduced, Arabidopsisthaliana T₁ plants into which the AsHPPDm-F415A nucleotide sequence was introduced and the wild-type Arabidopsisthaliana plants (18 days after sowing) were sprayed with topramezone at three different concentrations respectively, i.e. 25 g ai/ha (one-fold field concentrations, 1 x), 100 g ai/ha (four-fold field concentrations, 4 x) and 0 g ai/ha (water, 0 x). The experimental results were shown in TABLE 9.

TABLE 9

Topramezone tolerance of Arabidopsis thaliana T₁ plants into which HPPD gene mutated at other positions (non-372 positions) was introduced

| HPPD mutation type | Treatment concentration (gai/ha) | Grade 0 | Grade 1 | Grade 2 | Grade 3 | Score | Resistance Grade |
|---|---|---|---|---|---|---|---|
| wild-type | 0 | 20 | 0 | 0 | 0 | | |
| | 25 | 0 | 0 | 0 | 20 | 100 | non-resistant |
| | 100 | 0 | 0 | 0 | 20 | 100 | non-resistant |
| AsHPPD-02 | 0 | 20 | 0 | 0 | 0 | | |
| | 25 | 0 | 5 | 13 | 2 | 62 | poorly resistant |
| | 100 | 0 | 0 | 4 | 16 | 93 | non-resistant |
| AsHPPDm-Q284A | 0 | 20 | 0 | 0 | 0 | | |
| | 25 | 0 | 2 | 16 | 2 | 67 | poorly resistant |
| | 100 | 0 | 0 | 5 | 15 | 92 | non-resistant |
| AsHPPDm-L359W | 0 | 20 | 0 | 0 | 0 | | |
| | 25 | 0 | 0 | 2 | 18 | 97 | non-resistant |
| | 100 | 0 | 0 | 0 | 20 | 100 | non-resistant |
| AsHPPDm-F415A | 0 | 20 | 0 | 0 | 0 | | |
| | 25 | 0 | 6 | 12 | 2 | 60 | poorly resistant |
| | 100 | 0 | 0 | 0 | 20 | 100 | non-resistant |

[0277] The results in TABLE 9 showed that: as compared with the Arabidopsisthaliana T₁ plant into which the AsHPPD-02 nucleotide was introduced, the Arabidopsisthaliana T₁ plants into which the AsHPPDm-Q284A nucleotide sequence was introduced, the Arabidopsisthaliana T₁ plants into which the AsHPPDm-L359W nucleotide sequence was introduced, and the Arabidopsisthaliana T₁ plants into which the AsHPPDm-F415A nucleotide sequence was introduced showed no significant difference in terms of the tolerance to topramezone. It can be seen that not all the mutations of any positions in the HPPD amino acid sequence (such as the three positions described in this example or the adjacent positions of other known effective mutation positions) can confer topramezone tolerance to the plants, and it also indicates that the mutation at position 372 of the HPPD amino acid sequence of the present invention is of unpredictable technical effect.

### Example 8: Acquisition and Verification of Transgenic Soybean Plants

### 1. Transformation of Agrobacterium with the Recombinant Expression Vectors

[0278] According to the method for constructing the recombinant expression vector DBN11375 containing AsHPPDm-F372A-02 nucleotide sequence as described in point 3 of Example 1, the recombinant expression vector DBN11375NN was constructed as a control, and its structure was shown in FIG. 5 (Spec: the spectinomycin gene; RB: right border; eFMV: 34S enhancer of figwort mosaic virus (SEQ ID NO:7); prBrCBP: promoter of oilseed rape eukaryotic elongation factor gene 1α (Tsfl) (SEQ ID NO:8); spAtCTP2: Arabidopsisthaliana chloroplast transit peptide (SEQ ID NO:9); EPSPS: 5-enol-pyruvylshikimate-3-phosphate synthase gene (SEQ ID NO:10); tPsE9: terminator of pea RbcS gene (SEQ ID NO: 11); pr35S: cauliflower mosaic virus 35S promoter (SEQ ID NO: 14); PAT: phosphinothricin-N-acetyl-transferase gene (SEQ ID NO: 15); t35S: cauliflower mosaic virus 35S terminator (SEQ ID NO: 16); LB: left border).

[0279] The recombinant expression vectors DBN11375 described in point 3 of Example 1, DBN11376 and DBN11378 described in point 2 of Example 2, DBN11500 and DBN11502 described in Example 6, and the above-mentioned control recombinant expression vectors DBN11375NN were transformed into the Agrobacterium LBA4404 (Invitrogen, Chicago, USA, CAT: 18313-015) respectively using a liquid nitrogen method, under the following transformation conditions: 100 µL of Agrobacterium LBA4404, and 3 µL of plasmid DNA (recombinant expression vector) were placed in liquid nitrogen for 10 minutes, and bathed in warm water at 37° C. for 10 minutes; the transformed Agrobacterium LBA4404 were inoculated into an LB tube, cultured under the conditions of a temperature of 28° C. and a rotation speed of 200 rpm for 2 hours, and then spread on the LB plate containing 50 mg/L of rifampicin and 50 mg/L of spectinomycin until positive single clones were grown, and single clones were picked out for culturing and the plasmids thereof were extracted. The extracted plasmids were identified by sequencing. The results showed that the structures of the recombinant expression vectors DBN11375, DBN11376, DBN11378, DBN11500, DBN11502 and DBN11375NN were completely correct.

### 2. Acquisition of Transgenic Soybean Plants

[0280] According to the conventional Agrobacterium infection method, the cotyledonary node tissue of a sterilely cultured soybean variety Zhonghuangl3 was co-cultured with the Agrobacterium as described in point 1 of this Example, so as to introduce the T-DNA (including the figwort mosaic virus 34S enhancer sequence, the oilseed rape eukaryotic elongation factor gene 1α (Tsfl) promoter sequence, the Arabidopsisthaliana chloroplast transit peptide sequence, a 5-enolpyruvylshikimate-3-phosphate synthase gene, the pea RbcS gene terminator sequence, the Arabidopsisthaliana Ubiquitin10 gene promoter sequence, AsHPPDm-F372A-02 nucleotide sequence, ZmHPPDm-F372A-02 nucleotide sequence, PfHPPDm-F372A-02 nucleotide sequence, AsHPPDm-F372A-A110 nucleotide sequence, PfHPPDm-F372A-G413W nucleotide sequence, the nopaline synthetase gene terminator sequence, the cauliflower mosaic virus 35S promoter sequence, phosphinothricin-N-acetyl-transferase gene, and the cauliflower mosaic virus 35S terminator sequence) of the recombinant expression vectors DBN11375, DBN11376, DBN11378, DBN11500, DBN11502 and DBN11375NN into the soybean chromosomes, thereby obtaining soybean plants into which the AsHPPDm-F372A-02 nucleotide sequence was introduced, soybean plants into which the ZmHPPDm-F372A-02 nucleotide sequence was introduced, soybean plants into which the PfHPPDm-F372A-02 nucleotide sequence was introduced, soybean plants into which the AsHPPDm-F372A-A110 nucleotide sequence was introduced, soybean plants into which the PfHPPDm-F372A-G413W nucleotide sequence was introduced, and soybean plants into which the control vector DBN11375NN was introduced.

[0281] For the Agrobacterium-mediated soybean transformation, briefly, mature soybean seeds were germinated in a soybean germination culture medium (3.1 g/L of B5 salt, B5 vitamin, 20 g/L of sucrose, and 8 g/L of agar, pH 5.6), and then cultured under the conditions of a temperature of 25 ± 1° C.; and a photoperiod (light/dark) of 16 h/8 h. After 4-6 days of germination, soybean sterile seedlings swelling at bright green cotyledonary nodes were taken, hypocotyledonary axes were cut off 3-4 millimeters below the cotyledonary nodes, the cotyledons were cut longitudinally, and apical buds, lateral buds and seminal roots were removed. A wound was created at a cotyledonary node using the knife back of a scalpel, and the wounded cotyledonary node tissues were contacted with an Agrobacterium suspension, wherein the Agrobacterium can transfer the AsHPPDm-F372A-02 nucleotide sequence, ZmHPPDm-F372A-02 nucleotide sequence, PfHPPDm-F372A-02 nucleotide sequence, AsHPPDm-F372A-A110 nucleotide sequence, or PfHPPDm-F372A-G413W nucleotide sequence to the wounded cotyledonary node tissues (step 1: the infection step). In this step, the cotyledonary node tissues were preferably immersed in the Agrobacterium suspension (OD₆₆₀ = 0.5-0.8, an infection culture medium (2.15 g/L of MS salt, B5 vitamin, 20 g/L of sucrose, 10 g/L of glucose, 40 mg/L of acetosyringone (AS), 4 g/L of 2-morpholine ethanesulfonic acid (MES), and 2 mg/L of zeatin (ZT), pH 5.3)) to initiate the inoculation. The cotyledonary node tissues were co-cultured with Agrobacterium for a period of time (3 days) (step 2: the co-culturing step). Preferably, after the infection step, the cotyledonary node tissues were cultured in a solid culture medium (4.3 g/L of MS salt, B5 vitamin, 20 g/L of sucrose, 10 g/L of glucose, 4 g/L of MES, 2 mg/L of ZT, and 8 g/L of agar, pH 5.6). After this co-culturing stage, there can be an optional “recovery” step in which a recovery culture medium (3.1 g/L of B5 salt, B5 vitamin, 1 g/L of MES, 30 g/L of sucrose, 2 mg/L of ZT, 8 g/L of agar, 150 mg/L of cephalosporin, 100 mg/L of glutamic acid, and 100 mg/L of aspartic acid, pH 5.6) with the addition of at least one antibiotic (150-250 mg/L of cephalosporin) for inhibiting the growth of Agrobacterium, and without the addition of a selective agent for a plant transformant, was used (step 3: the recovery step). Preferably, tissue blocks regenerated from the cotyledonary nodes were cultured in a solid culture medium containing the antibiotic and no selective agent, to eliminate Agrobacterium and provide a recovery stage for the infected cells. Subsequently, the tissue blocks regenerated from the cotyledonary nodes were cultured in a culture medium containing a selective agent (glyphosate), and on-growing transformed calli were selected (step 4: the selection step). Preferably, the tissue blocks regenerated from the cotyledonary nodes were cultured in a screening solid culture medium (3.1 g/L of B5 salt, B5 vitamin, 1 g/L of MES, 30 g/L of sucrose, 1 mg/L of 6-benzyladenine (6-BAP), 8 g/L of agar, 150 mg/L of cephalosporin, 100 mg/L of glutamic acid, 100 mg/L of aspartic acid, and 0.25 mol/L of N-(phosphonomethyl)glycine, pH 5.6) containing a selective agent, thus resulting in selective growth of the transformed cells. Then, plants were regenerated from the transformed cells (step 5: the regeneration step). Preferably, the tissue blocks regenerated from the cotyledonary nodes grown in a culture medium containing a selective agent were cultured in solid culture media (a B5 differentiation culture medium and B5 rooting culture medium) to regenerate plants.

[0282] The screened out resistant tissues were transferred onto the B5 differentiation culture medium (3.1 g/L of B5 salt, B5 vitamin, 1 g/L of MES, 30 g/L of sucrose, 1 mg/L of ZT, 8 g/L of agar, 150 mg/L of cephalosporin, 50 mg/L of glutamic acid, 50 mg/L of aspartic acid, 1 mg/L of gibberellin, 1 mg/L of auxin, and 0.25 mol/L of N-(phosphonomethyl)glycine, pH 5.6), and cultured at 25° C. for differentiation. The differentiated seedlings were transferred onto the B5 rooting culture medium (3.1 g/L of B5 salt, B5 vitamin, 1 g/L of MES, 30 g/L of sucrose, 8 g/L of agar, 150 mg/L of cephalosporin, and 1 mg/L of indole-3-butyric acid (IBA)), cultured in the rooting culture medium at 25° C. until a height of about 10 cm, and then transferred to a glasshouse until fruiting. In the greenhouse, the plants were cultured at 26° C. for 16 hours, and then cultured at 20° C. for 8 hours per day.

[0283] The soybean T₀ plants into which the AsHPPDm-F372A-02 nucleotide sequence was introduced, soybean T₀ plants into which the ZmHPPDm-F372A-02 nucleotide sequence was introduced, soybean T₀ plants into which the PfHPPDm-F372A-02 nucleotide sequence was introduced, soybean T₀ plants into which the AsHPPDm-F372A-A110 nucleotide sequence was introduced, and soybean T₀ plants into which the PfHPPDm-F372A-G413W nucleotide sequence was introduced were transplanted into the greenhouse for cultivation and propagation to obtain corresponding transgenic T₁ plants.

### 3. Verification of the Transgenic Soybean Plants Using TaqMan

[0284] About 100 mg of leaves from the soybean T₁ plants into which the AsHPPDm-F372A-02 nucleotide sequence was introduced, soybean T₁ plants into which the ZmHPPDm-F372A-02 nucleotide sequence was introduced, soybean T₁ plants into which the PfHPPDm-F372A-02 nucleotide sequence was introduced, soybean T₁ plants into which the AsHPPDm-F372A-A110 nucleotide sequence was introduced, soybean T₁ plants into which the PfHPPDm-F372A-G413W nucleotide sequence was introduced, and soybean T₁ plants into which the control vector DBN11375NN was introduced were taken as samples, and the genomic DNA thereof was extracted with a DNeasy Plant Maxi Kit of Qiagen, and copy numbers of an EPSPS gene were detected by the Taqman probe fluorescence quantitative PCR method so as to determine the copy numbers of the mutant HPPD gene. At the same time, wild-type soybean plants were used as controls, and detected and analyzed according to the above-mentioned method. Triple repeats were set for the experiments, and were averaged.

[0285] The specific method for detecting the copy number of the EPSPS gene was as follows:
[0286] Step 11. 100 mg of leaves of the soybean T₁ plants into which the AsHPPDm-F372A-02 nucleotide sequence was introduced, soybean T₁ plants into which the ZmHPPDm-F372A-02 nucleotide sequence was introduced, soybean T₁ plants into which the PfHPPDm-F372A-02 nucleotide sequence was introduced, soybean T₁ plants into which the AsHPPDm-F372A-A110 nucleotide sequence was introduced, soybean T₁ plants into which the PfHPPDm-F372A-G413W nucleotide sequence was introduced, soybean T₁ plants into which the control vector DBN11375NN was introduced, and wild-type soybean plants were taken, and ground into a homogenate using liquid nitrogen in a mortar, and triple repeats were taken for each sample;
[0287] Step 12. The genomic DNA of the above-mentioned samples was extracted using a DNeasy Plant Mini Kit of Qiagen, with the particular method as described in the product manual;
[0288] Step 13. The concentrations of the genomic DNA of the above-mentioned samples were detected using NanoDrop 2000 (Thermo Scientific);
[0289] Step 14. The concentrations of the genomic DNA of the above-mentioned samples were adjusted to a same value in the range of from 80 to 100 ng/µL;
[0290] Step 15. The copy numbers of the samples were identified using the Taqman probe fluorescence quantitative PCR method, wherein samples for which the copy numbers were known and had been identified were taken as standards, the samples of the wild-type soybean plants were taken as the control, and triple repeats were taken for each sample, and were averaged; the sequences of fluorescence quantitative PCR primers and a probe were as follows:
   [0291] the following primers and probe were used to detect the EPSPS gene sequence:
   [0292] primer 1:ctggaaggcgaggacgtcatcaata, as set forth in SEQ ID NO: 401 in the SEQUENCE LISTING;
   [0293] primer 2: tggcggcattgccgaaatcgag, as set forth in SEQ ID NO: 402 in the SEQUENCE LISTING;
   [0294] probe 1: atgcaggcgatgggcgcccgcatccgta, as set forth in SEQ ID NO: 403 in the SEQUENCE LISTING;

| | |
|---|---|
| PCR reaction system: | |
| JumpStart™ Taq ReadyMix™ (Sigma) | 10 µL |
| 50× primer/probe mixture | 1 µL |
| genomic DNA | 3 µL |
| water (ddH₂0) | 6 µL |

[0295] The 50× primer/probe mixture comprises 45 µL of each primer at a concentration of 1 mM, 50 µL of the probe at a concentration of 100 µM, and 860 µL of 1× TE buffer, and was stored at 4° C. in an amber tube.

| PCR reaction conditions: | | |
|---|---|---|
| Step | Temperature | Time |
| 21 | 95° C. | 5 min |
| 22 | 95° C. | 30 s |
| 23 | 60° C. | 1 min |
| 24 | go back to step 22, and repeat 40 times | |

[0296] Data was analyzed using software SDS2.3 (Applied Biosystems).

[0297] By analyzing the experimental results of the copy number of the EPSPS gene, it was further demonstrated that the AsHPPDm-F372A-02 nucleotide sequence, ZmHPPDm-F372A-02 nucleotide sequence, PfHPPDm-F372A-02 nucleotide sequence, AsHPPDm-F372A-A110 nucleotide sequence, PfHPPDm-F372A-G413W nucleotide sequence had all been incorporated into the chromosome of the detected soybean plants, and all of the soybean T₁ plants into which the AsHPPDm-F372A-02 nucleotide sequence was introduced, soybean T₁ plants into which the ZmHPPDm-F372A-02 nucleotide sequence was introduced, soybean T₁ plants into which the PfHPPDm-F372A-02 nucleotide sequence was introduced, soybean T₁ plants into which the AsHPPDm-F372A-A110 nucleotide sequence was introduced, soybean T₁ plants into which the PfHPPDm-F372A-G413W nucleotide sequence was introduced, and the soybean T₁ plants into which the control vector DBN11375NN was introduced resulted in single-copy transgenic soybean plants.

### 4. Detection of the Herbicide Tolerance of the Transgenic Soybean Plants to Topramezone

[0298] The soybean T₁ plants into which the AsHPPDm-F372A-02 nucleotide sequence was introduced, soybean T₁ plants into which the ZmHPPDm-F372A-02 nucleotide sequence was introduced, soybean T₁ plants into which the PfHPPDm-F372A-02 nucleotide sequence was introduced, soybean T₁ plants into which the AsHPPDm-F372A-A110 nucleotide sequence was introduced, soybean T₁ plants into which, the PfHPPDm-F372A-G413W nucleotide sequence was introduced, soybean T₁ plants into which the control vector DBN11375NN was introduced and wild-type soybean plants (V3-V4 at seedling stage) were sprayed with topramezone at two different concentrations respectively, i.e. 50 g ai/ha (2-fold field concentration, 2 ×) and 100 g ai/ha (4-fold field concentration, 4 ×) to detect the herbicide tolerance of soybean plants. According to the method in point 6 of Example 1, after 7 days of spraying (7 DAT), the damage degree of each plant by the herbicide was statistically analyzed, and the scoring and resistance evaluation were carried out accordingly. The soybean plants into which the AsHPPDm-F372A-02 nucleotide sequence was introduced were of two strains in total (S1 and S2), the soybean plants into which the ZmHPPDm-F372A-02 nucleotide sequence was introduced were of two strains in total (S3 and S4), the soybean plants into which the PfHPPDm-F372A-02 nucleotide sequence was introduced were of two strains in total (S5 and S6), the soybean plants into which the AsHPPDm-F372A-Al 10 nucleotide sequence was introduced were of two strains in total (S7 and S8), the soybean plants into which the PfHPPDm-F372A-G413W nucleotide sequence was introduced were of two strains in total (S9 and S10), the soybean plants into which the control vector DBN11375NN nucleotide sequence was introduced were of one strain in total (S11), and the wild-type soybean plants were of one strain in total (CK1); and 8 plants were selected from each strain and detected. The results were shown in TABLE 10 and FIG. 7.

TABLE 10

Herbicide tolerance of transgenic soybean T₁ plants

| Source of the gene | Strain | Treatment concentration (gai/ha) | Classification and statistics of phytotoxicity | | | | Score | Resistance evaluation |
|---|---|---|---|---|---|---|---|---|
| | | | Grade 0 | Grade 1 | Grade 2 | Grade 3 | | |
| | CK1 | 50 | 0 | 0 | 0 | 8 | 100 | non-resistant |
| | | 100 | 0 | 0 | 0 | 8 | 100 | non-resistant |
| | S11 | 50 | 0 | 0 | 0 | 8 | 100 | non-resistant |
| | | 100 | 0 | 0 | 0 | 8 | 100 | non-resistant |
| Avena sativa | S1 | 50 | 8 | 0 | 0 | 0 | 0 | Highly resistant |
| | | 100 | 8 | 0 | 0 | 0 | 0 | Highly resistant |
| | S2 | 50 | 8 | 0 | 0 | 0 | 0 | Highly resistant |
| | | 100 | 8 | 0 | 0 | 0 | 0 | Highly resistant |
| | S7 | 50 | 8 | 0 | 0 | 0 | 0 | Highly resistant |
| | | 100 | 8 | 0 | 0 | 0 | 0 | Highly resistant |
| | S8 | 50 | 8 | 0 | 0 | 0 | 0 | Highly resistant |
| | | 100 | 8 | 0 | 0 | 0 | 0 | Highly resistant |
| Zea mays | S3 | 50 | 7 | 1 | 0 | 0 | 4 | Highly resistant |
| | | 100 | 2 | 5 | 1 | 0 | 29 | Moderately resistant |
| | S4 | 50 | 6 | 2 | 0 | 0 | 8 | Highly resistant |
| | | 100 | 2 | 6 | 0 | 0 | 25 | Moderately resistant |
| Pseudomonas fluorescens | S5 | 50 | 5 | 3 | 0 | 0 | 13 | Moderately resistant |
| | | 100 | 1 | 3 | 4 | 0 | 46 | Poorly resistant |
| | S6 | 50 | 4 | 3 | 1 | 0 | 21 | Moderately resistant |
| | | 100 | 0 | 5 | 3 | 0 | 46 | Poorly resistant |
| | S9 | 50 | 4 | 4 | 0 | 0 | 17 | Moderately resistant |
| | | 100 | 2 | 2 | 4 | 0 | 42 | Poorly resistant |
| | S10 | 50 | 5 | 2 | 1 | 0 | 17 | Moderately resistant |
| | | 100 | 0 | 4 | 4 | 0 | 50 | Poorly resistant |

[0299] For soybeans, 4-fold field concentration of topramezone is an effective dose for high-pressure treatment. The results in TABLE 10 and FIG. 7 showed: (1) as compared to the soybean T₁ plants into which the control vector DBN11375NN was introduced and the wild-type soybean plants, the soybean T₁ plants into which the AsHPPDm-F372A-02 nucleotide sequence was introduced, soybean T₁ plants into which the ZmHPPDm-F372A-02 nucleotide sequence was introduced, soybean T₁ plants into which the PfHPPDm-F372A-02 nucleotide sequence was introduced, soybean T₁ plants into which the AsHPPDm-F372A-A110 nucleotide sequence was introduced and soybean T₁ plants into which the PfHPPDm-F372A-G413W nucleotide sequence was introduced were able to produce higher tolerance to topramezone herbicides, indicating that the mutant HPPD (F372A) can confer the transgenic soybean plants a high level of tolerance to topramezone; (2) as compared to the soybean T₁ plants into which the AsHPPDm-F372A-02 nucleotide sequence was introduced and soybean T₁ plants into which the PfHPPDm-F372A-02 nucleotide sequence was introduced, there was no significant difference in the topramezone tolerance of soybean T₁ plants into which the AsHPPDm-F372A-A110 nucleotide sequence was introduced and the soybean T₁ plants into which the PfHPPDm-F372A-G413W nucleotide sequence was introduced, further indicating that the mutation at position 372 of the HPPD amino acid sequence confers importance and stability of the tolerance to topramezone upon the plants.

### Example 9: Acquisition and Verification of Transgenic Rice Plants

### 1. Construction of the Recombinant Expression Vectors of Rice Containing HPPD Gene

[0300] The 5′ and 3′ ends of the AsHPPDm-F372A-02 nucleotide sequence as described in point 1 of Example 1, the ZmHPPDm-F372A-02 nucleotide sequence and the PfHPPDm-F372A-02 nucleotide sequence as described in point 1 of Example 2, and the AsHPPDm-F372A-A110 nucleotide sequence as described in Example 6 were respectively linked to the following universal adapter primer 2:
[0301] Universal adapter primer 2 for the 5′ end: 5′- tgcagataccaagcggccactagt -3′, as set forth in SEQ ID NO: 404 in the SEQUENCE LISTING;
[0302] Universal adapter primer 2 for the 3′ end: 5′- caaatgtttgaacgatcggcgcgcc -3′, as set forth in SEQ ID NO: 400 in the SEQUENCE LISTING;

[0303] A plant expression vector DBNBC-02 was subjected to double digestion using restriction enzymes Spe I and Asc I to linearize the plant expression vector. The digestion product was purified to obtain the linearized DBNBC-02 expression vector backbone (vector backbone: pCAMBIA2301 (which is available from CAMBIA)), which then underwent a recombination reaction with the AsHPPDm-F372A-02 nucleotide sequence linked to the universal adapter primer 2, according to the procedure of Takara In-Fusion products seamless connection kit (Clontech, CA, USA, CAT: 121416) instructions, to construct a recombinant expression vector DBN11950 with the vector structure as shown in FIG. 6. (Spec: spectinomycin gene; RB: right border; prOsActl: rice actin 1 promoter (SEQ ID NO:405); PAT: phosphinothricin-N-acetyl-transferase gene (SEQ ID NO:15); t35S: cauliflower mosaic virus 35S terminator (SEQ ID NO: 16); pr35S: cauliflower mosaic virus 35S promoter (SEQ ID NO:14); iZmHSP70: Zea mays heat shock 70 kDa protein intron (SEQ ID NO:406); AsHPPDm-F372A-02: AsHPPDm-F372A-02 nucleotide sequence (SEQ ID NO:6); tNos: nopaline synthetase gene terminator (SEQ ID NO:13); prZmUbi: Zea mays ubiquitin 1 gene promoter (SEQ ID NO:407); Hpt: hygromycin phosphotransferase gene (SEQ ID NO:408); t35S: cauliflower mosaic virus 35S terminator (SEQ ID NO:16); LB: left border).

[0304] Escherichia coli T₁ competent cells were transformed according to the heat shock method described in point 3 of Example 1, and the plasmids in the cells were extracted through the alkaline method. The extracted plasmid was identified by sequencing. The results indicated that the recombinant expression vector DBN11950 contained the nucleotide sequence set forth in SEQ ID NO: 6 in the SEQUENCE LISTING, i.e. the AsHPPDm-F372A-02 nucleotide sequence.

[0305] According to the above method for constructing recombinant expression vector DBN11950, the ZmHPPDm-F372A-02 nucleotide sequence, the PfHPPDm-F372A-02 nucleotide sequence and the AsHPPDm-F372A-A110 nucleotide sequence which were linked to the universal adapter primer 2 were respectively subjected to a recombination reaction with the linearized DBNBC-02 expression vector backbone, to construct the recombinant expression vectors DBN11951 to DBN11953 in sequence. Sequencing verified that the ZmHPPDm-F372A-02 nucleotide sequence, the PfHPPDm-F372A-02 nucleotide sequence and the AsHPPDm-F372A-A110 nucleotide sequence were correctly inserted in the recombinant expression vectors DBN11951 to DBN11953.

### 2. Transformation of Agrobacterium With the Recombinant Expression Vectors

[0306] The recombinant expression vectors DBN11950 to DBN11953 which had been constructed correctly were respectively transformed into Agrobacterium EHA105α using a liquid nitrogen method, with the following transformation conditions: 100 µL of Agrobacterium EHA105α, and 3 µL of plasmid DNA (recombinant expression vector) were placed in liquid nitrogen for 10 minutes, and bathed in warm water at 37° C. for 10 minutes; the transformed Agrobacterium EHA105α was inoculated into an LB tube, cultured under the conditions of a temperature of 28° C. and a rotation speed of 200 rpm for 2 hours, and spread on the LB plate containing 50 mg/L of rifampicin and 50 mg/L of spectinomycin until positive single clones were grown, and single clones were picked out for culturing and the plasmids thereof were extracted. The extracted plasmids were identified by sequencing. The results showed that the structures of the recombinant expression vectors DBN11950 to DBN11953 were completely correct.

### 3. Acquisition of Transgenic Rice Plants

[0307] For the Agrobacterium-mediated rice transformation, briefly, the rice cultivar Nipponbare were germinated in the induction culture medium (3.1 g/L N6 salts, N6 vitamins, 300 mg/L casein, 30 g/L sucrose, 2 mg/L dichlorophenoxyacetic acid (2,4-D), 3 g/L plant gel; pH 5.8), and the calli were induced from mature rice embryos (Step 1: calli induction step). After that, calli were selected and then were contacted with an Agrobacterium suspension, wherein Agrobacterium can transfer the nucleotide sequences of AsHPPDm-F372A-02 nucleotide sequence, AsHPPDm-F372A-A110 nucleotide sequence, ZmHPPDm-F372A-02 nucleotide sequence or PfHPPDm-F372A-02 nucleotide sequence into at least one cell in one of the calli (step 2: infection step). In this step, the calli were preferably immersed in the Agrobacterium suspension (OD₆₆₀ = 0.3, infection medium (3.1 g/L N6 salts, N6 vitamins, 300 mg/L casein, 30 g/L sucrose, 10 g/L glucose, 40 mg/L AS, 2 mg/L 2,4-D; pH 5.4)) to start the inoculation. The calli were co-cultured with Agrobacterium for a period of time (3 days) (step 3: co-culturing step). Preferably, after the infection step, the calli were cultured in a solid medium (3.1 g/L N6 salts, N6 vitamins, 300 mg/L casein, 30 g/L sucrose, 10 g/L glucose, 40 mg/L AS, 2 mg/L 2,4-D, 3 g/L plant gel; pH 5.8). After the co-culturing step, there may be a “recovery” step in which a recovery medium (3.1 g/L N6 salts, N6 vitamins, 300 mg/L casein, 30 g/L sucrose, 2 mg/L 2,4-D, 3 g/L plant gel; pH 5.8) with the addition of at least one antibiotic (150-250 mg/L of cephamycin) for inhibiting the growth of Agrobacterium, and without the addition of any selective agent for plant transformants, was used (step 4: recovery step). Preferably, the calli were cultured in a solid medium comprising antibiotic but no selective agent, so as to eliminate Agrobacterium and provide a recovery period for the infected cells. Then, the inoculated calli were cultured on a medium containing a selective agent (hygromycin) and the on-growing transformed calli were selected (step 5: selection step). Preferably, the calli were cultured in a solid selective medium (3.1 g/L N6 salts, N6 vitamins, 300 mg/L casein, 30 g/L sucrose, 50 mg/L of hygromycin, 2 mg/L 2,4-D, 3 g/L plant gel; pH 5.8) comprising a selective agent, which resulted in the selective growth of the transformed cells. Then, the calli was regenerated into plants (step 6: regeneration step). Preferably, the calli growing on the medium containing a selective agent were cultured in a solid medium (N6 differential medium and MS rooting medium) to regenerate plants.

[0308] The resistant calli obtained from screening were transferred to N6 differential medium (3.1 g/L N6 salts, N6 vitamins, 300 mg/L casein, 30 g/L sucrose, 150 mg/L of cephamycin, 20 mg/L of hygromycin, 2 mg/L 6-benzyladenine, 1 mg/L napthalene acetic acid, 3 g/L plant gel; pH 5.8), and cultured for differentiation at 25° C. The differentiated plantlets were transferred to MS rooting medium (2.15 g/L MS salts, MS vitamins, 300 mg/L casein, 15 g/L sucrose, 3 g/L plant gel; pH 5.8), and cultured at 25° C. When the plantlets reached about 10 cm in height, they were moved to greenhouse and cultured until fruiting. In the greenhouse, they were cultured at 30° C. to obtain transformed T₀ rice plants.

[0309] The rice T₀ plants into which the AsHPPDm-F372A-02 nucleotide sequence was introduced, rice T₀ plants into which the AsHPPDm-F372A-A110 nucleotide sequence was introduced, rice T₀ plants into which the ZmHPPDm-F372A-02 nucleotide sequence was introduced and rice T₀ plants into which the PfHPPDm-F372A-02 nucleotide sequence was introduced were transplanted into the greenhouse for cultivation and propagation to obtain corresponding transgenic T₁ plants.

### 4. Verification of the Transgenic Rice Plants Using TaqMan

[0310] About 100 mg of leaves from the rice T₁ plants into which the AsHPPDm-F372A-02 nucleotide sequence was introduced, rice Ti plants into which the AsHPPDm-F372A-A110 nucleotide sequence was introduced, rice T₁ plants into which the ZmHPPDm-F372A-02 nucleotide sequence was introduced, and rice T₁ plants into which the PfHPPDm-F372A-02 nucleotide sequence was introduced were taken as samples, and the genomic DNA thereof was extracted with a DNeasy Plant Maxi Kit of Qiagen, and copy numbers of an Hpt gene were detected by the Taqman probe fluorescence quantitative PCR method so as to determine the copy numbers of the mutant HPPD gene. At the same time, wild-type rice plants were used as controls, and detected and analyzed according to the above-mentioned method. Triple repeats were set for the experiments, and were averaged.

[0311] The specific method for detecting the copy number of the Hpt gene was as follows:
[0312] Step 31. 100 mg of leaves of the rice plants into which the AsHPPDm-F372A-02 nucleotide sequence was introduced, rice plants into which the AsHPPDm-F372A-A110 nucleotide sequence was introduced, rice plants into which the ZmHPPDm-F372A-02 nucleotide sequence was introduced, rice plants into which the PfHPPDm-F372A-02 nucleotide sequence was introduced, and wild-type rice plants were taken, and ground into a homogenate using liquid nitrogen in a mortar, and triple repeats were taken for each sample;
[0313] Step 32. The genomic DNA of the above-mentioned samples was extracted using a DNeasy Plant Mini Kit of Qiagen, with the particular method as described in the product manual;
[0314] Step 33. The concentrations of the genomic DNA of the above-mentioned samples were detected using NanoDrop 2000 (Thermo Scientific);
[0315] Step 34. The concentrations of the genomic DNA of the above-mentioned samples were adjusted to a consistent value in the range of from 80 to 100 ng/µL;
[0316] Step 35. The copy numbers of the samples were identified using the Taqman probe fluorescence quantitative PCR method, wherein samples for which the copy numbers were known and had been identified were taken as standards, the samples of the wild-type rice plants were taken as the control, and triple repeats were taken for each sample, and were averaged; the sequences of fluorescence quantitative PCR primers and a probe were as follows:
   [0317] the following primers and probe were used to detect the Hpt gene sequence:
   [0318] primer 3: gcataacagcggtcattgactg, as set forth in SEQ ID NO: 409 in SEQUENCE LISTING;
   [0319] primer 4: agaagatgttggcgacctcg, as set forth in SEQ ID NO: 410 in SEQUENCE LISTING;
   [0320] probe 2: agcgaggcgatgttcggggattc, as set forth in SEQ ID NO: 411 in the SEQUENCE LISTING;

| | |
|---|---|
| PCR reaction system: | |
| JumpStart™ Taq ReadyMix™ (Sigma) | 10 µL |
| 50× primer/probe mixture | 1 µL |
| genomic DNA | 3 µL |
| water (ddH₂0) | 6 µL |

[0321] The 50× primer/probe mixture comprises 45 µL of each primer at a concentration of 1 mM, 50 µL of the probe at a concentration of 100 µM, and 860 µL of 1 × TE buffer, and was stored at 4° C. in an amber tube.

PCR reaction conditions:

| Step | Temperature | Time |
|---|---|---|
| 41 | 95° C. | 5 min |
| 42 | 95° C. | 30 s |
| 43 | 60° C. | 1 min |
| 44 | go back to step 42, and repeat 40 times | |

[0322] Data was analyzed using software SDS2.3 (Applied Biosystems).

[0323] By analyzing the experimental results of the copy number of the EPSPS gene, it was further demonstrated that the AsHPPDm-F372A-02 nucleotide sequence, AsHPPDm-F372A-A110 nucleotide sequence, ZmHPPDm-F372A-02 nucleotide sequence and PfHPPDm-F372A-02 nucleotide sequence had all been incorporated into the chromosome of the detected rice plants, and all of the rice T₁ plants into which the AsHPPDm-F372A-02 nucleotide sequence was introduced, rice T₁ plants into which the AsHPPDm-F372A-A110 nucleotide sequence was introduced, rice T₁ plants into which the ZmHPPDm-F372A-02 nucleotide sequence was introduced and rice T₁ plants into which the PfHPPDm-F372A-02 nucleotide sequence was introduced resulted in single-copy transgenic soybean plants.

### 5. Detection of the Herbicide Tolerance of the Transgenic Rice Plants

[0324] The rice T₁ plants into which the AsHPPDm-F372A-02 nucleotide sequence was introduced, rice T₁ plants into which the AsHPPDm-F372A-A110 nucleotide sequence was introduced, rice T₁ plants into which the ZmHPPDm-F372A-02 nucleotide sequence was introduced, rice T₁ plants into which the PfHPPDm-F372A-02 nucleotide sequence was introduced and wild-type rice plants (V3-V4 at seedling stage) were sprayed with topramezone at two different concentrations respectively, i.e. 50 g ai/ha (2-fold field concentration, 2 ×) and 100 g ai/ha (4-fold field concentration, 4 ×) to detect the herbicide tolerance of rice plants. According to the method in point 6 of Example 1, after 7 days of spraying (7 DAT), the damage degree of each plant by the herbicide was statistically analyzed, and the scoring and resistance evaluation were carried out accordingly. The rice T₁ plants into which AsHPPDm-F372A-02 nucleotide sequence was introduced were of two strains in total (S12 and S13), rice T₁ plants into which AsHPPDm-F372A-A1 10 nucleotide sequence was introduced were of two strains in total (S14 and S15), rice T₁ plants into which ZmHPPDm-F372A-02 nucleotide sequence was introduced were of two strains in total (S16 and S17), rice T₁ plants into which PfHPPDm-F372A-02 nucleotide sequence was introduced were of two strains in total (S18 and S19), and the wild-type rice plants were of one strain in total (CK2); and 8 plants were selected from each strain and tested. The results were shown in TABLE 11.

TABLE 11

Herbicide tolerance of transgenic rice T₁ plants

| Source of the gene | Strain | Treatment concentration (gai/ha) | Classification and statistics of phytotoxicity | | | | Score | Resistance evaluation |
|---|---|---|---|---|---|---|---|---|
| | | | Grade 0 | Grade 1 | Grade 2 | Grade 3 | | |
| | CK2 | 50 | 0 | 0 | 0 | 8 | 100 | non-resistant |
| | | 100 | 0 | 0 | 0 | 8 | 100 | non-resistant |
| Avena saliva | S12 | 50 | 8 | 0 | 0 | 0 | 0 | Highly resistant |
| | | 100 | 8 | 0 | 0 | 0 | 0 | Highly resistant |
| | S13 | 50 | 8 | 0 | 0 | 0 | 0 | Highly resistant |
| | | 100 | 85 | 0 | 0 | 0 | 0 | Highly resistant |
| | S14 | 50 | 8 | 0 | 0 | 0 | 0 | Highly resistant |
| | | 100 | 8 | 0 | 0 | 0 | 0 | Highly resistant |
| | S15 | 50 | 8 | 0 | 0 | 0 | 0 | Highly resistant |
| | | 100 | 7 | 1 | 0 | 0 | 4 | Highly resistant |
| Zea mays | S16 | 50 | 8 | 0 | 0 | 0 | 0 | Highly resistant |
| | | 100 | 3 | 3 | 2 | 0 | 29 | Moderately resistant |
| | S17 | 50 | 6 | 2 | 0 | 0 | 8 | Highly resistant |
| | | 100 | 5 | 2 | 1 | 0 | 17 | Moderately resistant |
| Pseudomonas fluorescens | S18 | 50 | 4 | 3 | 1 | 0 | 21 | Moderately resistant |
| | | 100 | 1 | 4 | 3 | 0 | 42 | Poorly resistant |
| | S19 | 50 | 4 | 4 | 0 | 0 | 17 | Moderately resistant |
| | | 100 | 0 | 3 | 5 | 0 | 54 | Poorly resistant |

[0325] For rice, 4-fold field concentration of topramezone is an effective dose for high-pressure treatment. The results in TABLE 11 showed that as compared to the wild-type rice plants, the rice T₁ plants into which the AsHPPDm-F372A-02 nucleotide sequence was introduced, rice T₁ plants into which the AsHPPDm-F372A-A110 nucleotide sequence was introduced, rice T₁ plants into which the ZmHPPDm-F372A-02 nucleotide sequence was introduced, rice T₁ plants into which the PfHPPDm-F372A-02 nucleotide sequence was introduced were able to produce higher tolerance to topramezone herbicides. Meanwhile, there was no significant difference between the topramezone tolerance of the rice T₁ plants into which the AsHPPDm-F372A-02 nucleotide sequence was introduced and that of the rice T₁ plants into which the AsHPPDm-F372A-A110 nucleotide sequence was introduced, indicating that the mutation at position 372 of the HPPD amino acid sequence is sufficient to provide the transgenic rice plants with a high level of tolerance to topramezone herbicides.

### Example 10: Verification of the Tolerance of Transgenic Soybean Plants to Other HPPD Inhibitors

[0326] In order to further verify the tolerance effect of HPPD (F372A) on other HPPD inhibitors, the soybean T₁ plants into which the AsHPPDm-F372A-02 nucleotide sequence was introduced, soybean T₁ plants into which the ZmHPPDm-F372A-02 nucleotide sequence was introduced, soybean T₁ plants into which the PfHPPDm-F372A-02 nucleotide sequence was introduced, soybean T₁ plants into which the AsHPPDm-F372A-A110 nucleotide sequence was introduced, soybean T₁ plants into which the control vector DBN11375NN was introduced in Example 8, and the wild-type soybean plants (V3-V4 at seedling stage) were sprayed as follows to detect the herbicide tolerance of each soybean plants, (1) 140 g ai/ha (2-fold field concentration, 2 ×) isoxaflutole; (2) 280 g ai/ha (4-fold field concentration, 4 ×) isoxaflutole; (3) 210 g ai/ha (2-fold field concentration, 2 ×) mesotrione; (4) 420 g ai/ha (4-fold field concentration, 4 ×) mesotrione. According to the method in point 6 of Example 1, after 7 days of spraying (7 DAT), the damage degree of each plant by the herbicide was statistically analyzed, and the scoring and resistance evaluation were carried out accordingly. The soybean T₁ plants into which AsHPPDm-F372A-02 nucleotide sequence was introduced were of two strains in total (S1 and S2), the soybean T₁ plants into which the ZmHPPDm-F372A-02 nucleotide sequence was introduced were of two strains in total (S3 and S4), the soybean T₁ plants into which the PfHPPDm-F372A-02 nucleotide sequence was introduced were of two strains in total (S5 and S6), the soybean T₁ plants into which the AsHPPDm-F372A-A110 nucleotide sequence was introduced were of two strains in total (S7 and S8), the soybean T₁ plants into which the control vector DBN11375NN nucleotide sequence was introduced were of one strain in total (S11), and the wild-type soybean plants were of one strain in total (CK1); and 8 plants were selected from each strain and tested. The results were shown in TABLE 12.

TABLE 12

Herbicide tolerance of transgenic rice T₁ plants

| Source of the gene | Strain | Treatment concentration of isoxaflutole (g ai/ha) | Resistance evaluation | Treatment concentration of mesotrione (gai/ha) | Resistance evaluation |
|---|---|---|---|---|---|
| | CK1 | 140 | non-resistant | 210 | non-resistant |
| | | 280 | non-resistant | 420 | non-resistant |
| | S11 | 140 | non-resistant | 210 | non-resistant |
| | | 280 | non-resistant | 420 | non-resistant |
| Avena sativa | S1 | 140 | Highly resistant | 210 | Highly resistant |
| | | 280 | Moderately resistant | 420 | Highly resistant |
| | S2 | 140 | Highly resistant | 210 | Highly resistant |
| | | 280 | Moderately resistant | 420 | Highly resistant |
| | S7 | 140 | Highly resistant | 210 | Highly resistant |
| | | 280 | Moderately resistant | 420 | Highly resistant |
| | S8 | 140 | Highly resistant | 210 | Highly resistant |
| | | 280 | Moderately resistant | 420 | Highly resistant |
| Zea mays | S3 | 140 | Moderately resistant | 210 | Moderately resistant |
| | | 280 | Poorly resistant | 420 | Poorly resistant |
| | S4 | 140 | Moderately resistant | 210 | Poorly resistant |
| | | 280 | Poorly resistant | 420 | Poorly resistant |
| Pseudomonas fluorescens | S5 | 140 | Highly resistant | 210 | Moderately resistant |
| | | 280 | Moderately resistant | 420 | Poorly resistant |
| | S6 | 140 | Highly resistant | 210 | Moderately resistant |
| | | 280 | Moderately resistant | 420 | Poorly resistant |

[0327] For soybeans, 4-fold field concentration of isoxaflutole and 4-fold field concentration of mesotrione are effective doses for high-pressure treatment. The results in TABLE 12 showed: (1) as compared to the soybean T₁ plants into which the control vector DBN11375NN was introduced and the wild-type soybean plants, the soybean T₁ plants into which the AsHPPDm-F372A-02 nucleotide sequence was introduced, soybean T₁ plants into which the ZmHPPDm-F372A-02 nucleotide sequence was introduced, soybean T₁ plants into which the PfHPPDm-F372A-02 nucleotide sequence was introduced and soybean T₁ plants into which the AsHPPDm-F372A-A110 nucleotide sequence was introduced were able to produce different degrees of tolerance to isoxaflutole and mesotrione herbicides, and especially soybean T₁ plants with HPPD gene at position 372 mutated from Avenasativa origin have better herbicide tolerance to isoxaflutole and mesotrione, indicating that the mutant HPPD (F372A) can confer the tolerance to these two HPPD inhibitor herbicides upon the transgenic soybean plants; (2) as compared to the soybean T₁ plants into which the AsHPPDm-F372A-02 nucleotide sequence was introduced, there was no significant difference in the isoxaflutole and mesotrione herbicides tolerance of soybean T₁ plants into which the AsHPPDm-F372A-A110 nucleotide sequence was introduced, indicating that the mutation at position 372 of the HPPD amino acid sequence is sufficient to provide the plants with a high level of tolerance to isoxaflutole and mesotrione herbicides.

[0328] In conclusion, the present invention discloses for the first time that mutation at position 372 of hydroxyphenyl pyruvate dioxygenase polypeptides from different species can confer a higher tolerance to pyrazolinates, isoxazoles and triketones HPPD inhibitor herbicides upon plants, to such an extent that the plants can tolerate at least one-fold field concentration of topramezone, isoxaflutole or mesotrione. Therefore, the present invention has a broad application prospect in plants.

[0329] At last, it should be noted that all the above Examples are only used to illustrate the embodiments of the present invention rather than to limit the present invention. Although the present invention is described in detail with reference to the preferred Examples, those skilled in the art should understand that the embodiments of the present invention could be modified or substituted equivalently without departing from the spirit and scope of the technical solutions of the present invention.

The application's sequence listing, which the Patent Office published only in electronic form, follows.

SEQUENCE LISTING (425 sequences)

SEQ ID NO: 1 - protein, 440 aa, Avena sativa
  AsHPPD Amido Acid Sequence
MPPTPATATGAAAAAVTPEHAARSFPRVVRVNPRSDRFPVLSFHHVELWCADAASAAGRFSFALGAPLAARSDLSTGNSAHASLLLRSGALAFLFTAPYAPPPQEAATAAATASIPSFSADAARTFAAAHGLAVRSVGVRVADAAEAFRVSVAGGARPAFAPADLGHGFGLAEVELYGDVVLRFVSYPDETDLPFLPGFERVSSPGAVDYGLTRFDHVVGNVPEMAPVIDYMKGFLGFHEFAEFTAEDVGTTESGLNSVVLANNSEAVLLPLNEPVHGTKRRSQIQTYLEYHGGPGVQHIALASNDVLRTLREMRARTPMGGFEFMAPPQAKYYEGVRRIAGDVLSEEQIKECQELGVLVDRDDQGVLLQIFTKPVGDRPTFFLEMIQRIGCMEKDEVGQEYQKGGCGGFGKGNFSELFKSIEDYEKSLEVKQSVVAQKS

SEQ ID NO: 2 - DNA, 1323 bp, Avena sativa
  AsHPPD-01 Nucleotide Sequence
atgccgcccacccccgccaccgccaccggcgccgccgcggccgccgtgactccagagcacgcggcccggagctttccccgagtggtccgcgtcaacccgcgcagcgaccgcttccccgtgctctccttccaccacgtcgagctctggtgcgccgacgccgcctcagcggccggacgcttctccttcgcgctcggcgcgccgctcgccgcccggtccgacctctccacggggaactccgcgcacgcctccctcctgctccgctcgggcgccctcgccttcctcttcacggcgccctacgcgccgccgccgcaggaggccgccacggccgcagccaccgcctccatcccctccttctccgccgacgccgcgcggacgttcgccgccgcccacggcctcgcggtgcgctccgtcggggtccgcgtcgctgacgccgccgaggccttccgcgtcagcgtagccggcggcgctcgcccggccttcgccccagccgacctcggccatggcttcggcctcgccgaggtcgagctctacggcgacgtcgtgctacgcttcgtcagctacccggacgagacagacctgccattcctgccagggttcgagcgcgtgagcagccccggcgccgtggactacggcctcacgcggttcgaccacgtcgtgggcaacgtcccggagatggccccggtcatagactacatgaaaggcttcttggggttccacgagttcgccgagttcaccgccgaggacgtgggcacgaccgagagcgggctcaactcggtggtgctcgccaacaactccgaggccgtgctgctgccgctcaacgagcccgtgcacggcacaaagcgacggagccagatacagacgtacctggagtatcacggcgggcccggcgtgcagcacatcgcgctcgccagcaacgacgtgctcaggacgctcagggagatgcgggcgcgcacgcccatgggcggcttcgagttcatggcgccaccgcaggcgaaatactatgaaggcgtgcggcgcatcgcaggtgacgtgctctcggaagagcagatcaaggaatgccaggagctgggggtgctagtcgacagggatgatcaaggggtgttgctccaaatcttcaccaagccagtaggggacaggccaacgtttttcctggagatgatccaaagaatcgggtgcatggagaaggacgaggtcgggcaagagtaccagaagggtggctgcggcgggtttggcaagggcaatttctccgagctgttcaagtccattgaggactatgagaaatcccttgaggtcaagcaatctgttgtagctcagaaatcctag

SEQ ID NO: 3 - DNA, 1323 bp, Artificial Sequence
  AsHPPD-02 Nucleotide Sequence
atgccacctactccagctacagctactggtgctgctgctgctgccgttactcctgagcacgctgccaggtcattccccagggtggttcgcgtgaaccccagatctgataggttcccagttctgagcttccaccatgttgagctgtggtgcgctgatgctgcttctgctgctggcaggttctctttcgctcttggtgctccactcgctgctagatctgatctgtctacaggaaatagcgctcatgcctcactcctgcttcgctcaggtgctttggccttcctcttcaccgctccatatgctcccccacctcaggaggctgctactgctgctgctacagcctccattccaagcttctcagctgatgccgctagaaccttcgctgctgctcatggacttgccgtgaggtctgttggtgttcgcgtggctgatgctgctgaggctttcagagtttccgttgccggcggagctaggccagctttcgctcctgctgatttgggacatggtttcggcctggctgaggttgagctttacggtgacgtggttctccgcttcgtgtcttacccagatgagactgacctgcctttccttcccggcttcgagagagtttcctctcctggtgccgtggattacggcctgacaaggttcgaccacgtggttggaaacgttcccgagatggctccagtgatcgattacatgaagggcttccttggattccatgagttcgccgagttcactgctgaggacgtgggaaccactgagtccggtttgaactctgtggttctcgccaacaattctgaggctgttttgctccctctgaatgagcctgtgcatggaaccaagaggagaagccagattcaaacttacctggagtaccacggtggccctggagttcagcatatcgcccttgcttctaatgatgtgttgcgcacactcagagagatgcgcgccagaacccccatgggaggtttcgagttcatggccccaccacaggctaagtactacgagggcgttagaaggattgctggagacgtgttgagcgaggagcagatcaaggagtgccaagagctgggtgttcttgtggatagggatgaccagggcgttctgcttcaaattttcactaagccagtgggcgaccgccctacattcttccttgagatgattcaaagaatcggctgcatggagaaggatgaggttggacaggagtaccaaaagggcggatgcggtggcttcggaaagggtaacttcagcgagttgttcaagtcaatcgaggactacgagaagagcctcgaggtgaagcagtcagtggttgcccaaaagtcctga

SEQ ID NO: 4 - protein, 440 aa, Artificial Sequence
  AsHPPDm-F372A Amido Acid Sequence
MPPTPATATGAAAAAVTPEHAARSFPRVVRVNPRSDRFPVLSFHHVELWCADAASAAGRFSFALGAPLAARSDLSTGNSAHASLLLRSGALAFLFTAPYAPPPQEAATAAATASIPSFSADAARTFAAAHGLAVRSVGVRVADAAEAFRVSVAGGARPAFAPADLGHGFGLAEVELYGDVVLRFVSYPDETDLPFLPGFERVSSPGAVDYGLTRFDHVVGNVPEMAPVIDYMKGFLGFHEFAEFTAEDVGTTESGLNSVVLANNSEAVLLPLNEPVHGTKRRSQIQTYLEYHGGPGVQHIALASNDVLRTLREMRARTPMGGFEFMAPPQAKYYEGVRRIAGDVLSEEQIKECQELGVLVDRDDQGVLLQIATKPVGDRPTFFLEMIQRIGCMEKDEVGQEYQKGGCGGFGKGNFSELFKSIEDYEKSLEVKQSVVAQKS

SEQ ID NO: 5 - DNA, 1323 bp, Artificial Sequence
  AsHPPDm-F372A-01 Nucleotide Sequence
atgccgcccacccccgccaccgccaccggcgccgccgcggccgccgtgactccagagcacgcggcccggagctttccccgagtggtccgcgtcaacccgcgcagcgaccgcttccccgtgctctccttccaccacgtcgagctctggtgcgccgacgccgcctcagcggccggacgcttctccttcgcgctcggcgcgccgctcgccgcccggtccgacctctccacggggaactccgcgcacgcctccctcctgctccgctcgggcgccctcgccttcctcttcacggcgccctacgcgccgccgccgcaggaggccgccacggccgcagccaccgcctccatcccctccttctccgccgacgccgcgcggacgttcgccgccgcccacggcctcgcggtgcgctccgtcggggtccgcgtcgctgacgccgccgaggccttccgcgtcagcgtagccggcggcgctcgcccggccttcgccccagccgacctcggccatggcttcggcctcgccgaggtcgagctctacggcgacgtcgtgctacgcttcgtcagctacccggacgagacagacctgccattcctgccagggttcgagcgcgtgagcagccccggcgccgtggactacggcctcacgcggttcgaccacgtcgtgggcaacgtcccggagatggccccggtcatagactacatgaaaggcttcttggggttccacgagttcgccgagttcaccgccgaggacgtgggcacgaccgagagcgggctcaactcggtggtgctcgccaacaactccgaggccgtgctgctgccgctcaacgagcccgtgcacggcacaaagcgacggagccagatacagacgtacctggagtatcacggcgggcccggcgtgcagcacatcgcgctcgccagcaacgacgtgctcaggacgctcagggagatgcgggcgcgcacgcccatgggcggcttcgagttcatggcgccaccgcaggcgaaatactatgaaggcgtgcggcgcatcgcaggtgacgtgctctcggaagagcagatcaaggaatgccaggagctgggggtgctagtcgacagggatgatcaaggggtgttgctccaaatcgctaccaagccagtaggggacaggccaacgtttttcctggagatgatccaaagaatcgggtgcatggagaaggacgaggtcgggcaagagtaccagaagggtggctgcggcgggtttggcaagggcaatttctccgagctgttcaagtccattgaggactatgagaaatcccttgaggtcaagcaatctgttgtagctcagaaatcctag

SEQ ID NO: 6 - DNA, 1323 bp, Artificial Sequence
  AsHPPDm-F372A-02 Nucleotide Sequence
atgccacctactccagctacagctactggtgctgctgctgctgccgttactcctgagcacgctgccaggtcattccccagggtggttcgcgtgaaccccagatctgataggttcccagttctgagcttccaccatgttgagctgtggtgcgctgatgctgcttctgctgctggcaggttctctttcgctcttggtgctccactcgctgctagatctgatctgtctacaggaaatagcgctcatgcctcactcctgcttcgctcaggtgctttggccttcctcttcaccgctccatatgctcccccacctcaggaggctgctactgctgctgctacagcctccattccaagcttctcagctgatgccgctagaaccttcgctgctgctcatggacttgccgtgaggtctgttggtgttcgcgtggctgatgctgctgaggctttcagagtttccgttgccggcggagctaggccagctttcgctcctgctgatttgggacatggtttcggcctggctgaggttgagctttacggtgacgtggttctccgcttcgtgtcttacccagatgagactgacctgcctttccttcccggcttcgagagagtttcctctcctggtgccgtggattacggcctgacaaggttcgaccacgtggttggaaacgttcccgagatggctccagtgatcgattacatgaagggcttccttggattccatgagttcgccgagttcactgctgaggacgtgggaaccactgagtccggtttgaactctgtggttctcgccaacaattctgaggctgttttgctccctctgaatgagcctgtgcatggaaccaagaggagaagccagattcaaacttacctggagtaccacggtggccctggagttcagcatatcgcccttgcttctaatgatgtgttgcgcacactcagagagatgcgcgccagaacccccatgggaggtttcgagttcatggccccaccacaggctaagtactacgagggcgttagaaggattgctggagacgtgttgagcgaggagcagatcaaggagtgccaagagctgggtgttcttgtggatagggatgaccagggcgttctgcttcaaattgccactaagccagtgggcgaccgccctacattcttccttgagatgattcaaagaatcggctgcatggagaaggatgaggttggacaggagtaccaaaagggcggatgcggtggcttcggaaagggtaacttcagcgagttgttcaagtcaatcgaggactacgagaagagcctcgaggtgaagcagtcagtggttgcccaaaagtcctga

SEQ ID NO: 7 - DNA, 542 bp, Figwort mosaic virus
  Figwort mosaic virus 34S enhancer
aattctcagtccaaagcctcaacaaggtcagggtacagagtctccaaaccattagccaaaagctacaggagatcaatgaagaatcttcaatcaaagtaaactactgttccagcacatgcatcatggtcagtaagtttcagaaaaagacatccaccgaagacttaaagttagtgggcatctttgaaagtaatcttgtcaacatcgagcagctggcttgtggggaccagacaaaaaaggaatggtgcagaattgttaggcgcacctaccaaaagcatctttgcctttattgcaaagataaagcagattcctctagtacaagtggggaacaaaataacgtggaaaagagctgtcctgacagcccactcactaatgcgtatgacgaacgcagtgacgaccacaaaagaattagcttgagctcaggatttagcagcattccagattgggttcaatcaacaaggtacgagccatatcactttattcaaattggtatcgccaaaaccaagaaggaactcccatcctcaaaggtttgtaaggaagaattc

SEQ ID NO: 8 - DNA, 1534 bp, Brassica napus
  promoter of oilseed rape eukaryotic elongation factor gene 1a (Tsf1)
gattatgacattgctcgtggaatgggacagttatggtatttttttgtaataaattgtttccattgtcatgagattttgaggttaatctatgagacattgaatcacttagcattagggattaagtagtcacaaatcgcattcaagaagctgaagaacacgttatggtctaatggttgtgtctctttattagaaaatgttggtcagtagctatatgcactgtttctgtaaaaccatgttggtgttgtgtttatttcaagacacatgttgagtccgttgattcagagcttttgtcttcgaacacaatctagagagcaaatttgggttcaatttggatatcaatatgggttcgattcagatagaacaataccctttgatgtcgggtttcgatttggttgagattcatttttatcgggtttggttcgattttcgaattcggtttattcgccccctcatagcatctacattctgcagattaatgtacaagttatggaaaaaaaaatgtggttttcgaattcggtttagtagctaaacgttgcttgcagtgtagttatgggaattatgaaacacgaccgaaggtatcaattagaagaacgggtcaacgggtaagtattgagaaattaccggagggtaaaaataaacagtattctttttttttcttaacgaccgaccaaggttaaaaaaagaaaggaggacgagatacaggggcatgactgtaattgtacataagatctgatctttaaaccctaggtttccttcgcatcagcaactataaataattctgagtgccactcttcttcattcctagatctttcgccttatcgctttagctgaggtaagcctttctatacgcatagacgctctcttttctcttctctcgatcttcgttgaaacggtcctcgatacgcataggatcggttagaatcgttaatctatcgtcttagatcttcttgattgttgaattgagcttctaggatgtattgtatcatgtgatggatagttgattggatctctttgagtgaactagctagctttcgatgcgtgtgatttcagtataacaggatccgatgaattatagctcgcttacaattaatctctgcagatttattgtttaatcttggatttgatgctcgttgttgatagaggatcgtttatagaacttattgattctggaattgagcttgtgtgatgtattgtatcatgtgatcgatagctgatggatctatttgagtgaactagcgtacgatcttaagatgagtgtgtattgtgaactgatgattcgagatcagcaaaacaagatctgatgatatcttcgtcttgtatgcatcttgaatttcatgattttttattaattatagctcgcttagctcaaaggatagagcaccacaaaattttattgtggtagaaatcggttcgattccgatagcagcttactgtgatgaatgattttgagatttggtatttgatatatgtctactgtgttgaatgatcgtttatgcattgtttaatcgctgcagatttgcattgacaagtagcc

SEQ ID NO: 9 - DNA, 228 bp, Arabidopsis thaliana
  Arabidopsis thaliana chloroplast transit peptide
atggcgcaagttagcagaatctgcaatggtgtgcagaacccatctcttatctccaatctctcgaaatccagtcaacgcaaatctcccttatcggtttctctgaagacgcagcagcatccacgagcttatccgatttcgtcgtcgtggggattgaagaagagtgggatgacgttaattggctctgagcttcgtcctcttaaggtcatgtcttctgtttccacggcgtgc

SEQ ID NO: 10 - DNA, 1368 bp, Artificial Sequence
  EPSPS gene Nucleotide Sequence
atgcttcacggtgcaagcagccgtccagcaactgctcgtaagtcctctggtctttctggaaccgtccgtattccaggtgacaagtctatctcccacaggtccttcatgtttggaggtctcgctagcggtgaaactcgtatcaccggtcttttggaaggtgaagatgttatcaacactggtaaggctatgcaagctatgggtgccagaatccgtaaggaaggtgatacttggatcattgatggtgttggtaacggtggactccttgctcctgaggctcctctcgatttcggtaacgctgcaactggttgccgtttgactatgggtcttgttggtgtttacgatttcgatagcactttcattggtgacgcttctctcactaagcgtccaatgggtcgtgtgttgaacccacttcgcgaaatgggtgtgcaggtgaagtctgaagacggtgatcgtcttccagttaccttgcgtggaccaaagactccaacgccaatcacctacagggtacctatggcttccgctcaagtgaagtccgctgttctgcttgctggtctcaacaccccaggtatcaccactgttatcgagccaatcatgactcgtgaccacactgaaaagatgcttcaaggttttggtgctaaccttaccgttgagactgatgctgacggtgtgcgtaccatccgtcttgaaggtcgtggtaagctcaccggtcaagtgattgatgttccaggtgatccatcctctactgctttcccattggttgctgccttgcttgttccaggttccgacgtcaccatccttaacgttttgatgaacccaacccgtactggtctcatcttgactctgcaggaaatgggtgccgacatcgaagtgatcaacccacgtcttgctggtggagaagacgtggctgacttgcgtgttcgttcttctactttgaagggtgttactgttccagaagaccgtgctccttctatgatcgacgagtatccaattctcgctgttgcagctgcattcgctgaaggtgctaccgttatgaacggtttggaagaactccgtgttaaggaaagcgaccgtctttctgctgtcgcaaacggtctcaagctcaacggtgttgattgcgatgaaggtgagacttctctcgtcgtgcgtggtcgtcctgacggtaagggtctcggtaacgcttctggagcagctgtcgctacccacctcgatcaccgtatcgctatgagcttcctcgttatgggtctcgtttctgaaaaccctgttactgttgatgatgctactatgatcgctactagcttcccagagttcatggatttgatggctggtcttggagctaagatcgaactctccgacactaaggctgcttga

SEQ ID NO: 11 - DNA, 643 bp, Pisum sativum
  Terminator of pea RbcS gene (Pisum sativum)
agctttcgttcgtatcatcggtttcgacaacgttcgtcaagttcaatgcatcagtttcattgcgcacacaccagaatcctactgagtttgagtattatggcattgggaaaactgtttttcttgtaccatttgttgtgcttgtaatttactgtgttttttattcggttttcgctatcgaactgtgaaatggaaatggatggagaagagttaatgaatgatatggtccttttgttcattctcaaattaatattatttgttttttctcttatttgttgtgtgttgaatttgaaattataagagatatgcaaacattttgttttgagtaaaaatgtgtcaaatcgtggcctctaatgaccgaagttaatatgaggagtaaaacacttgtagttgtaccattatgcttattcactaggcaacaaatatattttcagacctagaaaagctgcaaatgttactgaatacaagtatgtcctcttgtgttttagacatttatgaactttcctttatgtaattttccagaatccttgtcagattctaatcattgctttataattatagttatactcatggatttgtagttgagtatgaaaatattttttaatgcattttatgacttgccaattgattgacaacatgcatcaat

SEQ ID NO: 12 - DNA, 1322 bp, Arabidopsis thaliana
  promoter of Arabidopsis thaliana Ubiquitin 10 gene
gtcgacctgcaggtcaacggatcaggatattcttgtttaagatgttgaactctatggaggtttgtatgaactgatgatctaggaccggataagttcccttcttcatagcgaacttattcaaagaatgttttgtgtatcattcttgttacattgttattaatgaaaaaatattattggtcattggactgaacacgagtgttaaatatggaccaggccccaaataagatccattgatatatgaattaaataacaagaataaatcgagtcaccaaaccacttgccttttttaacgagacttgttcaccaacttgatacaaaagtcattatcctatgcaaatcaataatcatacaaaaatatccaataacactaaaaaattaaaagaaatggataatttcacaatatgttatacgataaagaagttacttttccaagaaattcactgattttataagcccacttgcattagataaatggcaaaaaaaaacaaaaaggaaaagaaataaagcacgaagaattctagaaaatacgaaatacgcttcaatgcagtgggacccacggttcaattattgccaattttcagctccaccgtatatttaaaaaataaaacgataatgctaaaaaaatataaatcgtaacgatcgttaaatctcaacggctggatcttatgacgaccgttagaaattgtggttgtcgacgagtcagtaataaacggcgtcaaagtggttgcagccggcacacacgagtcgtgtttatcaactcaaagcacaaatacttttcctcaacctaaaaataaggcaattagccaaaaacaactttgcgtgtaaacaacgctcaatacacgtgtcattttattattagctattgcttcaccgccttagctttctcgtgacctagtcgtcctcgtcttttcttcttcttcttctataaaacaatacccaaagcttcttcttcacaattcagatttcaatttctcaaaatcttaaaaactttctctcaattctctctaccgtgatcaaggtaaatttctgtgttccttattctctcaaaatcttcgattttgttttcgttcgatcccaatttcgtatatgttctttggtttagattctgttaatcttagatcgaagacgattttctgggtttgatcgttagatatcatcttaattctcgattagggtttcataaatatcatccgatttgttcaaataatttgagttttgtcgaataattactcttcgatttgtgatttctatctagatctggtgttagtttctagtttgtgcgatcgaatttgtcgattaatctgagtttttctgattaacag

SEQ ID NO: 13 - DNA, 253 bp, Agrobacterium tumefaciens
  Terminator (Agrobacterium tumefaciens)
gatcgttcaaacatttggcaataaagtttcttaagattgaatcctgttgccggtcttgcgatgattatcatataatttctgttgaattacgttaagcatgtaataattaacatgtaatgcatgacgttatttatgagatgggtttttatgattagagtcccgcaattatacatttaatacgcgatagaaaacaaaatatagcgcgcaaactaggataaattatcgcgcgcggtgtcatctatgttactagatc

SEQ ID NO: 14 - DNA, 530 bp, Cauliflower mosaic virus
  Promoter (Cauliflower mosaic virus)
ccatggagtcaaagattcaaatagaggacctaacagaactcgccgtaaagactggcgaacagttcatacagagtctcttacgactcaatgacaagaagaaaatcttcgtcaacatggtggagcacgacacgcttgtctactccaaaaatatcaaagatacagtctcagaagaccaaagggcaattgagacttttcaacaaagggtaatatccggaaacctcctcggattccattgcccagctatctgtcactttattgtgaagatagtggaaaaggaaggtggctcctacaaatgccatcattgcgataaaggaaaggccatcgttgaagatgcctctgccgacagtggtcccaaagatggacccccacccacgaggagcatcgtggaaaaagaagacgttccaaccacgtcttcaaagcaagtggattgatgtgatatctccactgacgtaagggatgacgcacaatcccactatccttcgcaagacccttcctctatataaggaagttcatttcatttggagaggaca

SEQ ID NO: 15 - DNA, 552 bp, Streptomyces viridochromogenes
  Phosphinothricin N-acetyltransferase gene Nucleotide Sequence
atgtctccggagaggagaccagttgagattaggccagctacagcagctgatatggccgcggtttgtgatatcgttaaccattacattgagacgtctacagtgaactttaggacagagccacaaacaccacaagagtggattgatgatctagagaggttgcaagatagatacccttggttggttgctgaggttgagggtgttgtggctggtattgcttacgctgggccctggaaggctaggaacgcttacgattggacagttgagagtactgtttacgtgtcacataggcatcaaaggttgggcctaggatccacattgtacacacatttgcttaagtctatggaggcgcaaggttttaagtctgtggttgctgttataggccttccaaacgatccatctgttaggttgcatgaggctttgggatacacagcccggggtacattgcgcgcagctggatacaagcatggtggatggcatgatgttggtttttggcaaagggattttgagttgccagctcctccaaggccagttaggccagttacccagatctga

SEQ ID NO: 16 - DNA, 195 bp, Cauliflower mosaic virus
  Terminator (Cauliflower mosaic virus)
ctgaaatcaccagtctctctctacaaatctatctctctctataataatgtgtgagtagttcccagataagggaattagggttcttatagggtttcgctcatgtgttgagcatataagaaacccttagtatgtatttgtatttgtaaaatacttctatcaataaaatttctaattcctaaaaccaaaatccagtgg

SEQ ID NO: 17 - protein, 444 aa, Zea mays
  ZmHPPD Amino Acid Sequence (Zea mays)
MPPTPTAAAAGAAVAAASAAEQAAFRLVGHRNFVRFNPRSDRFHTLAFHHVELWCADAASAAGRFSFGLGAPLAARSDLSTGNSAHASLLLRSGSLSFLFTAPYAHGADAATAALPSFSAAAARRFAADHGLAVRAVALRVADAEEAFRTSVAAGARPAFGPVDLGRGFRLAEVELYGDVVLRYVSYPDGAAGEPFLPGFEGVASPGAADYGLSRFDHIVGNVPELAPAAAYFAGFTGFHEFAEFTTEDVGTAESGLNSMVLANNSENVLLPLNEPVHGTKRRSQIQTFLDHHGGPGVQHMALASDDVLRTLREMQARSAMGGFEFMAPPTSDYYDGVRRRAGDVLTEAQIKECQELGVLVDRDDQGVLLQIFPKPVGDRPTLFLEIIQRIGCMERDEKGQEYQKGGCGGFGKGNFSQLFKSIEDYEKSLEAMQAAAAATAQGS

SEQ ID NO: 18 - DNA, 1335 bp, Zea mays
  ZmHPPD-01 Nucleotide Sequence(Zea mays)
atgcccccgacccccacagccgccgcagccggcgccgccgtggcggcggcatcagcagcggagcaggcggcgttccgcctcgtgggccaccgcaacttcgtccgcttcaacccgcgctccgaccgcttccacacgctcgcgttccaccacgtggagctctggtgcgccgacgcggcctccgccgcgggccgcttctccttcggcctgggcgcgccgctcgccgcgcgctccgacctctccacgggcaactccgcgcacgcgtccctgctgctccgctccggctccctctccttcctcttcacggcgccctacgcgcacggcgccgacgccgccaccgctgcgctgccctccttctccgccgccgccgcgcggcgcttcgcggccgaccacggcctcgcggtgcgcgccgtcgcgctccgcgtcgccgacgccgaggaggccttccgcaccagcgtcgcggccggggcgcgcccggctttcggccccgtcgacctcggccgcggcttccgcctcgccgaggtcgagctctacggcgacgtcgtgctccggtacgtgagctacccggacggcgcggcgggcgagcccttcctgccggggttcgagggcgtggccagccccggggcggccgactacgggctgagcaggttcgaccacatcgtcggcaacgtgccggagctggcgcccgccgccgcctacttcgccggcttcacggggttccacgagttcgccgagttcacgacggaggacgtgggcaccgcggagagcggcctcaactccatggtgctcgccaacaactcggagaacgtgctgctcccgctcaacgagccggtgcacggcaccaagcgccgcagccagatacagacgttcctggaccaccacggcggccccggcgtgcagcacatggcgctggccagcgacgacgtgctcaggacgctgagggagatgcaggcgcgctcggccatgggcggcttcgagttcatggcgcctcccacatccgactactatgacggcgtgaggcggcgcgccggggacgtgctcacggaagcacagattaaggagtgccaggagctaggggtgctggtggatagggatgaccagggcgtgctgctccaaatcttccccaagccagtgggggacaggccaacgctgttcttggagatcatccaaaggatcgggtgcatggagagggatgagaaggggcaagaataccagaagggtggctgcggcgggttcggcaagggaaacttctcgcagctgttcaaatccatcgaggattatgagaagtcccttgaagccatgcaagctgctgcagcagctacagctcagggatcctag

SEQ ID NO: 19 - DNA, 1335 bp, Artificial Sequence
  ZmHPPD-02 Nucleotide Sequence
atgccacccacacccacagcagcagcggcgggcgcagcggtcgcagcggcgtcagcggcggagcaagcggcgttcagattggttggtcaccgcaacttcgtgagattcaatcctcgctcagatagattccatactctggccttccaccatgttgagctttggtgcgctgatgctgcttctgctgctggaaggttcagcttcggtttgggtgctcccctcgctgctagatctgatttgagcactggtaactcagcacatgcttccctcctgcttagatctggctctctgagcttccttttcactgctccatatgctcatggtgctgatgctgctacagctgctctcccttcattctccgctgctgctgctaggagattcgctgctgatcacggattggctgtgagggctgttgcacttagagttgctgatgctgaggaggccttccgcacctctgttgctgctggagccagaccagctttcggacctgttgatctcggaaggggtttccgcctggctgaggtggagctttacggcgatgtggttctgcgctacgttagctatcctgatggtgctgctggtgaacctttccttccaggattcgagggtgtggcctcaccaggtgccgctgattacggcctgtccagattcgaccacattgttggaaatgttcctgagcttgctccagctgctgcctacttcgctggcttcaccggattccatgagttcgccgagttcaccactgaggatgtgggaactgctgagtctggtttgaatagcatggtgctcgccaacaattcagagaacgttttgctccctctgaatgagcccgtgcacggaacaaagagaaggtcccagattcaaaccttcttggatcaccacggcggcccaggtgttcagcatatggctctcgcctccgatgacgtgttgagaaccctcagggagatgcaagccaggtctgctatgggtggcttcgagttcatggccccacctacaagcgattactatgatggtgtgcgcagaagggctggcgacgttcttaccgaggctcagatcaaggagtgccaagagctgggcgtgcttgttgatagagatgaccagggagttctgcttcaaattttccccaagccagtgggcgacaggcctactttgttcctcgagattatccagagaatcggatgcatggagagggatgagaagggtcaggagtaccaaaagggaggttgcggcggattcggcaagggaaatttctcacaactcttcaagtccatcgaggactatgaaaagagtctggaagcgatgcaggcagcagcagcagcaaccgcacaggggtcgtga

SEQ ID NO: 20 - protein, 444 aa, Artificial Sequence
  ZmHPPDm-F372A Amino Acid Sequence
MPPTPTAAAAGAAVAAASAAEQAAFRLVGHRNFVRFNPRSDRFHTLAFHHVELWCADAASAAGRFSFGLGAPLAARSDLSTGNSAHASLLLRSGSLSFLFTAPYAHGADAATAALPSFSAAAARRFAADHGLAVRAVALRVADAEEAFRTSVAAGARPAFGPVDLGRGFRLAEVELYGDVVLRYVSYPDGAAGEPFLPGFEGVASPGAADYGLSRFDHIVGNVPELAPAAAYFAGFTGFHEFAEFTTEDVGTAESGLNSMVLANNSENVLLPLNEPVHGTKRRSQIQTFLDHHGGPGVQHMALASDDVLRTLREMQARSAMGGFEFMAPPTSDYYDGVRRRAGDVLTEAQIKECQELGVLVDRDDQGVLLQIAPKPVGDRPTLFLEIIQRIGCMERDEKGQEYQKGGCGGFGKGNFSQLFKSIEDYEKSLEAMQAAAAATAQGS

SEQ ID NO: 21 - DNA, 1335 bp, Artificial Sequence
  ZmHPPDm-F372A-01 Nucleotide Sequence
atgcccccgacccccacagccgccgcagccggcgccgccgtggcggcggcatcagcagcggagcaggcggcgttccgcctcgtgggccaccgcaacttcgtccgcttcaacccgcgctccgaccgcttccacacgctcgcgttccaccacgtggagctctggtgcgccgacgcggcctccgccgcgggccgcttctccttcggcctgggcgcgccgctcgccgcgcgctccgacctctccacgggcaactccgcgcacgcgtccctgctgctccgctccggctccctctccttcctcttcacggcgccctacgcgcacggcgccgacgccgccaccgctgcgctgccctccttctccgccgccgccgcgcggcgcttcgcggccgaccacggcctcgcggtgcgcgccgtcgcgctccgcgtcgccgacgccgaggaggccttccgcaccagcgtcgcggccggggcgcgcccggctttcggccccgtcgacctcggccgcggcttccgcctcgccgaggtcgagctctacggcgacgtcgtgctccggtacgtgagctacccggacggcgcggcgggcgagcccttcctgccggggttcgagggcgtggccagccccggggcggccgactacgggctgagcaggttcgaccacatcgtcggcaacgtgccggagctggcgcccgccgccgcctacttcgccggcttcacggggttccacgagttcgccgagttcacgacggaggacgtgggcaccgcggagagcggcctcaactccatggtgctcgccaacaactcggagaacgtgctgctcccgctcaacgagccggtgcacggcaccaagcgccgcagccagatacagacgttcctggaccaccacggcggccccggcgtgcagcacatggcgctggccagcgacgacgtgctcaggacgctgagggagatgcaggcgcgctcggccatgggcggcttcgagttcatggcgcctcccacatccgactactatgacggcgtgaggcggcgcgccggggacgtgctcacggaagcacagattaaggagtgccaggagctaggggtgctggtggatagggatgaccagggcgtgctgctccaaatcgctcccaagccagtgggggacaggccaacgctgttcttggagatcatccaaaggatcgggtgcatggagagggatgagaaggggcaagaataccagaagggtggctgcggcgggttcggcaagggaaacttctcgcagctgttcaaatccatcgaggattatgagaagtcccttgaagccatgcaagctgctgcagcagctacagctcagggatcctag

SEQ ID NO: 22 - DNA, 1335 bp, Artificial Sequence
  ZmHPPDm-F372A-02 Nucleotide Sequence
atgccacccacacccacagcagcagcggcgggcgcagcggtcgcagcggcgtcagcggcggagcaagcggcgttcagattggttggtcaccgcaacttcgtgagattcaatcctcgctcagatagattccatactctggccttccaccatgttgagctttggtgcgctgatgctgcttctgctgctggaaggttcagcttcggtttgggtgctcccctcgctgctagatctgatttgagcactggtaactcagcacatgcttccctcctgcttagatctggctctctgagcttccttttcactgctccatatgctcatggtgctgatgctgctacagctgctctcccttcattctccgctgctgctgctaggagattcgctgctgatcacggattggctgtgagggctgttgcacttagagttgctgatgctgaggaggccttccgcacctctgttgctgctggagccagaccagctttcggacctgttgatctcggaaggggtttccgcctggctgaggtggagctttacggcgatgtggttctgcgctacgttagctatcctgatggtgctgctggtgaacctttccttccaggattcgagggtgtggcctcaccaggtgccgctgattacggcctgtccagattcgaccacattgttggaaatgttcctgagcttgctccagctgctgcctacttcgctggcttcaccggattccatgagttcgccgagttcaccactgaggatgtgggaactgctgagtctggtttgaatagcatggtgctcgccaacaattcagagaacgttttgctccctctgaatgagcccgtgcacggaacaaagagaaggtcccagattcaaaccttcttggatcaccacggcggcccaggtgttcagcatatggctctcgcctccgatgacgtgttgagaaccctcagggagatgcaagccaggtctgctatgggtggcttcgagttcatggccccacctacaagcgattactatgatggtgtgcgcagaagggctggcgacgttcttaccgaggctcagatcaaggagtgccaagagctgggcgtgcttgttgatagagatgaccagggagttctgcttcaaattgctcccaagccagtgggcgacaggcctactttgttcctcgagattatccagagaatcggatgcatggagagggatgagaagggtcaggagtaccaaaagggaggttgcggcggattcggcaagggaaatttctcacaactcttcaagtccatcgaggactatgaaaagagtctggaagcgatgcaggcagcagcagcagcaaccgcacaggggtcgtga

SEQ ID NO: 23 - protein, 445 aa, Arabidopsis thaliana
  Arabidopsis thaliana HPPD Amido Acid Sequence
MGHQNAAVSENQNHDDGAASSPGFKLVGFSKFVRKNPKSDKFKVKRFHHIEFWCGDATNVARRFSWGLGMRFSAKSDLSTGNMVHASYLLTSGDLRFLFTAPYSPSLSAGEIKPTTTASIPSFDHGSCRSFFSSHGLGVRAVAIEVEDAESAFSISVANGAIPSSPPIVLNEAVTIAEVKLYGDVVLRYVSYKAEDTEKSEFLPGFERVEDASSFPLDYGIRRLDHAVGNVPELGPALTYVAGFTGFHQFAEFTADDVGTAESGLNSAVLASNDEMVLLPINEPVHGTKRKSQIQTYLEHNEGAGLQHLALMSEDIFRTLREMRKRSSIGGFDFMPSPPPTYYQNLKKRVGDVLSDDQIKECEELGILVDRDDQGTLLQIFTKPLGDRPTIFIEIIQRVGCMMKDEEGKAYQSGGCGGFGKGNFSELFKSIEEYEKTLEAKQLVG

SEQ ID NO: 24 - DNA, 1338 bp, Arabidopsis thaliana
  Arabidopsis thaliana AtHPPD Nucleotide Sequence
atgggccaccaaaacgccgccgtttcagagaatcaaaaccatgatgacggcgctgcgtcgtcgccgggattcaagctcgtcggattttccaagttcgtaagaaagaatccaaagtctgataaattcaaggttaagcgcttccatcacatcgagttctggtgcggcgacgcaaccaacgtcgctcgtcgcttctcctggggtctggggatgagattctccgccaaatccgatctttccaccggaaacatggttcacgcctcttacctactcacctccggtgacctccgattccttttcactgctccttactctccgtctctctccgccggagagattaaaccgacaaccacagcttctatcccaagtttcgatcacggctcttgtcgttccttcttctcttcacatggtctcggtgttagagccgttgcgattgaagtagaagacgcagagtcagctttctccatcagtgtagctaatggcgctattccttcgtcgcctcctatcgtcctcaatgaagcagttacgatcgctgaggttaaactatacggcgatgttgttctccgatatgttagttacaaagcagaagataccgaaaaatccgaattcttgccagggttcgagcgtgtagaggatgcgtcgtcgttcccattggattatggtatccggcggcttgaccacgccgtgggaaacgttcctgagcttggtccggctttaacttatgtagcggggttcactggttttcaccaattcgcagagttcacagcagacgacgttggaaccgccgagagcggtttaaattcagcggtcctggctagcaatgatgaaatggttcttctaccgattaacgagccagtgcacggaacaaagaggaagagtcagattcagacgtatttggaacataacgaaggcgcagggctacaacatctggctctgatgagtgaagacatattcaggaccctgagagagatgaggaagaggagcagtattggaggattcgacttcatgccttctcctccgcctacttactaccagaatctcaagaaacgggtcggcgacgtgctcagcgatgatcagatcaaggagtgtgaggaattagggattcttgtagacagagatgatcaagggacgttgcttcaaatcttcacaaaaccactaggtgacaggccgacgatatttatagagataatccagagagtaggatgcatgatgaaagatgaggaagggaaggcttaccagagtggaggatgtggtggttttggcaaaggcaatttctctgagctcttcaagtccattgaagaatacgaaaagactcttgaagccaaacagttagtgggatga

SEQ ID NO: 25 - protein, 445 aa, Artificial Sequence
  AtHPPDm-F372A Amino Acid Sequence
MGHQNAAVSENQNHDDGAASSPGFKLVGFSKFVRKNPKSDKFKVKRFHHIEFWCGDATNVARRFSWGLGMRFSAKSDLSTGNMVHASYLLTSGDLRFLFTAPYSPSLSAGEIKPTTTASIPSFDHGSCRSFFSSHGLGVRAVAIEVEDAESAFSISVANGAIPSSPPIVLNEAVTIAEVKLYGDVVLRYVSYKAEDTEKSEFLPGFERVEDASSFPLDYGIRRLDHAVGNVPELGPALTYVAGFTGFHQFAEFTADDVGTAESGLNSAVLASNDEMVLLPINEPVHGTKRKSQIQTYLEHNEGAGLQHLALMSEDIFRTLREMRKRSSIGGFDFMPSPPPTYYQNLKKRVGDVLSDDQIKECEELGILVDRDDQGTLLQIATKPLGDRPTIFIEIIQRVGCMMKDEEGKAYQSGGCGGFGKGNFSELFKSIEEYEKTLEAKQLVG

SEQ ID NO: 26 - DNA, 1338 bp, Artificial Sequence
  AtHPPDm-F372A Nucleotide Sequence
atgggccaccaaaacgccgccgtttcagagaatcaaaaccatgatgacggcgctgcgtcgtcgccgggattcaagctcgtcggattttccaagttcgtaagaaagaatccaaagtctgataaattcaaggttaagcgcttccatcacatcgagttctggtgcggcgacgcaaccaacgtcgctcgtcgcttctcctggggtctggggatgagattctccgccaaatccgatctttccaccggaaacatggttcacgcctcttacctactcacctccggtgacctccgattccttttcactgctccttactctccgtctctctccgccggagagattaaaccgacaaccacagcttctatcccaagtttcgatcacggctcttgtcgttccttcttctcttcacatggtctcggtgttagagccgttgcgattgaagtagaagacgcagagtcagctttctccatcagtgtagctaatggcgctattccttcgtcgcctcctatcgtcctcaatgaagcagttacgatcgctgaggttaaactatacggcgatgttgttctccgatatgttagttacaaagcagaagataccgaaaaatccgaattcttgccagggttcgagcgtgtagaggatgcgtcgtcgttcccattggattatggtatccggcggcttgaccacgccgtgggaaacgttcctgagcttggtccggctttaacttatgtagcggggttcactggttttcaccaattcgcagagttcacagcagacgacgttggaaccgccgagagcggtttaaattcagcggtcctggctagcaatgatgaaatggttcttctaccgattaacgagccagtgcacggaacaaagaggaagagtcagattcagacgtatttggaacataacgaaggcgcagggctacaacatctggctctgatgagtgaagacatattcaggaccctgagagagatgaggaagaggagcagtattggaggattcgacttcatgccttctcctccgcctacttactaccagaatctcaagaaacgggtcggcgacgtgctcagcgatgatcagatcaaggagtgtgaggaattagggattcttgtagacagagatgatcaagggacgttgcttcaaatcgctacaaaaccactaggtgacaggccgacgatatttatagagataatccagagagtaggatgcatgatgaaagatgaggaagggaaggcttaccagagtggaggatgtggtggttttggcaaaggcaatttctctgagctcttcaagtccattgaagaatacgaaaagactcttgaagccaaacagttagtgggatga

SEQ ID NO: 27 - protein, 358 aa, Pseudomonas fluorescens
  PfHPPD Amino Acid Sequence
MADLYENPMGLMGFEFIEFASPTPGTLEPIFEIMGFTKVATHRSKNVHLYRQGEINLILNNEPNSIASYFAAEHGPSVCGMAFRVKDSQKAYNRALELGAQPIHIDTGPMELNLPAIKGIGGAPLYLIDRFGEGSSIYDIDFVYLEGVERNPVGAGLKVIDHLTHNVYRGRMVYWANFYEKLFNFREARYFDIKGEYTGLTSKAMSAPDGMIRIPLNEESSKGAGQIEEFLMQFNGEGIQHVAFLTDDLVKTWDALKKIGMRFMTAPPDTYYEMLEGRLPDHGEPVDQLQARGILLDGSSVEGDKRLLLQIFSETLMGPVFFEFIQRKGDDGFGEGNFKALFESIERDQVRRGVLTAD

SEQ ID NO: 28 - DNA, 1077 bp, Pseudomonas fluorescens
  PfHPPD-01 Nucleotide Sequence
atggcagatctatacgaaaacccaatgggcctgatgggctttgaattcatcgaattcgcgtcgccgacgccgggcaccctggagccgatcttcgagatcatgggcttcaccaaagtcgcgacccaccgttccaagaacgtgcacctgtaccgccagggcgagatcaacctgatcctcaacaacgagcccaacagcatcgcctcctactttgcggccgaacacggcccgtcggtgtgcggcatggcgttccgcgtgaaggactcgcaaaaggcctacaaccgcgccctggaactcggcgcccagccgatccatattgacaccgggccgatggaattgaacctgccggcgatcaagggcatcggcggcgcgccgttgtacctgatcgaccgtttcggcgaaggcagctcgatctacgacatcgacttcgtgtacctcgaaggtgtggagcgcaatccggtcggtgcaggtctcaaagtcatcgaccacctgacccacaacgtctatcgcggccgcatggtctactgggccaacttctacgagaaattgttcaacttccgtgaagcgcgttacttcgatatcaagggcgagtacaccggcctgacttccaaggccatgagtgcgccggacggcatgatccgcatcccgctgaacgaagagtcgtccaagggcgcggggcagatcgaagagttcctgatgcagttcaacggcgaaggcatccagcacgtggcgttcctcaccgacgacctggtcaagacctgggacgcgttgaagaaaatcggcatgcgcttcatgaccgcgccgccagacacttattacgaaatgctcgaaggccgcctgcctgaccacggcgagccggtggatcaactgcaggcacgcggtatcctgctggacggatcttccgtggaaggcgacaaacgcctgctgctgcagatcttctcggaaaccctgatgggcccggtgttcttcgaattcatccagcgcaagggcgacgatgggtttggcgagggcaacttcaaggcgctgttcgagtccatcgaacgtgaccaggtgcgtcgtggtgtattgaccgccgattaa

SEQ ID NO: 29 - DNA, 1077 bp, Artificial Sequence
  PfHPPD-02 Nucleotide Sequence
atggctgatttgtatgaaaatcctatgggattgatgggatttgaatttattgaatttgcttctcctactcctggaactttggaacctatttttgaaattatgggatttactaaggttgctactcatagatctaagaatgttcatttgtatagacaaggagaaattaatttgattttgaataatgaacctaattctattgcttcttattttgctgctgaacatggaccttctgtttgtggaatggcttttagagttaaggattctcaaaaggcttataatagagctttggaattgggagctcaacctattcatattgatactggacctatggaattgaatttgcctgctattaagggaattggaggagctcctttgtatttgattgatagatttggagaaggatcttctatttatgatattgattttgtttatttggaaggagttgaaagaaatcctgttggagctggattgaaggttattgatcatttgactcataatgtttatagaggaagaatggtttattgggctaatttttatgaaaagttgtttaattttagagaagctagatattttgatattaagggagaatatactggattgacttctaaggctatgtctgctcctgatggaatgattagaattcctttgaatgaagaatcttctaagggagctggacaaattgaagaatttttgatgcaatttaatggagaaggaattcaacatgttgcttttttgactgatgatttggttaagacttgggatgctttgaagaagattggaatgagatttatgactgctcctcctgatacttattatgaaatgttggaaggaagattgcctgatcatggagaacctgttgatcaattgcaagctagaggaattttgttggatggatcttctgttgaaggagataagagattgttgttgcaaattttttctgaaactttgatgggacctgttttttttgaatttattcaaagaaagggagatgatggatttggagaaggaaattttaaggctttgtttgaatctattgaaagagatcaagttagaagaggagttttgactgctgattga

SEQ ID NO: 30 - protein, 358 aa, Artificial Sequence
  PfHPPDm-F372A Amino Acid Sequence
MADLYENPMGLMGFEFIEFASPTPGTLEPIFEIMGFTKVATHRSKNVHLYRQGEINLILNNEPNSIASYFAAEHGPSVCGMAFRVKDSQKAYNRALELGAQPIHIDTGPMELNLPAIKGIGGAPLYLIDRFGEGSSIYDIDFVYLEGVERNPVGAGLKVIDHLTHNVYRGRMVYWANFYEKLFNFREARYFDIKGEYTGLTSKAMSAPDGMIRIPLNEESSKGAGQIEEFLMQFNGEGIQHVAFLTDDLVKTWDALKKIGMRFMTAPPDTYYEMLEGRLPDHGEPVDQLQARGILLDGSSVEGDKRLLLQIASETLMGPVFFEFIQRKGDDGFGEGNFKALFESIERDQVRRGVLTAD

SEQ ID NO: 31 - DNA, 1077 bp, Artificial Sequence
  PfHPPDm-F372A-01 Nucleotide Sequence
atggcagatctatacgaaaacccaatgggcctgatgggctttgaattcatcgaattcgcgtcgccgacgccgggcaccctggagccgatcttcgagatcatgggcttcaccaaagtcgcgacccaccgttccaagaacgtgcacctgtaccgccagggcgagatcaacctgatcctcaacaacgagcccaacagcatcgcctcctactttgcggccgaacacggcccgtcggtgtgcggcatggcgttccgcgtgaaggactcgcaaaaggcctacaaccgcgccctggaactcggcgcccagccgatccatattgacaccgggccgatggaattgaacctgccggcgatcaagggcatcggcggcgcgccgttgtacctgatcgaccgtttcggcgaaggcagctcgatctacgacatcgacttcgtgtacctcgaaggtgtggagcgcaatccggtcggtgcaggtctcaaagtcatcgaccacctgacccacaacgtctatcgcggccgcatggtctactgggccaacttctacgagaaattgttcaacttccgtgaagcgcgttacttcgatatcaagggcgagtacaccggcctgacttccaaggccatgagtgcgccggacggcatgatccgcatcccgctgaacgaagagtcgtccaagggcgcggggcagatcgaagagttcctgatgcagttcaacggcgaaggcatccagcacgtggcgttcctcaccgacgacctggtcaagacctgggacgcgttgaagaaaatcggcatgcgcttcatgaccgcgccgccagacacttattacgaaatgctcgaaggccgcctgcctgaccacggcgagccggtggatcaactgcaggcacgcggtatcctgctggacggatcttccgtggaaggcgacaaacgcctgctgctgcagatcgcttcggaaaccctgatgggcccggtgttcttcgaattcatccagcgcaagggcgacgatgggtttggcgagggcaacttcaaggcgctgttcgagtccatcgaacgtgaccaggtgcgtcgtggtgtattgaccgccgattaa

SEQ ID NO: 32 - DNA, 1077 bp, Artificial Sequence
  PfHPPDm-F372A-02 Nucleotide Sequence
atggccgatttgtacgagaacccaatgggactcatgggtttcgagttcattgagttcgcttcccccaccccaggtactttggagcctattttcgagatcatgggcttcactaaggttgccacacacaggtctaagaatgtgcatctctaccgccaaggagagattaacctgatccttaacaatgagcctaatagcatcgcctcatacttcgctgctgagcatggtccatctgtttgcggcatggctttcagagtgaaggattcacaaaaggcctacaacagggctttggagctcggcgcccagcccattcatatcgacaccggacctatggagctgaatcttcctgccattaagggcatcggcggagctccattgtacctcattgatcgcttcggcgagggctcctctatctacgatatcgacttcgtgtacctggagggcgttgagagaaaccctgtgggagctggtctgaaggttatcgaccaccttactcataatgtttacagaggaaggatggtgtactgggccaacttctacgagaagctgttcaatttccgcgaggctagatacttcgatattaagggcgagtacacaggacttacctccaaggccatgtctgctcccgacggtatgattaggatcccattgaacgaggagagctcaaagggcgccggacagattgaggagttcctcatgcaattcaatggtgaaggcatccagcacgttgctttcctgacagatgaccttgtgaagacctgggatgccctcaagaagattggcatgaggttcatgaccgctccacctgacacttactacgagatgttggagggacgcctccctgatcatggcgagcccgttgaccagctgcaagctagaggaatcctcctggatggttcctctgtggagggcgacaagaggcttttgctccaaattgctagcgagactcttatgggacccgtgttcttcgagttcatccagaggaagggcgatgacggattcggcgagggcaacttcaaggccctgttcgagtctattgagagagatcaggtgaggcgcggcgttcttacagctgactga

SEQ ID NO: 33 - protein, 436 aa, Gossypium hirsutum
  GsHPPD Amino Acid Sequence
MVQTNQSGSGNDFKLVGFSNFVRSNPKSDRFTVKRFHHIEFWCTDATNVARRFSWGLGMQFVAKSDLSTGNLTHASYLLRSRDLNFLFTAPYSPSIAVAQNLSPQSTASIPSFDHSLCRSFAATHGLGVRAIAIEVDDAETAFTTSVTHGALPFCPPTPLGDVATIAEVKLYGDVVLRYVSYTTTINSDHDFLPGFEKIEDTLSYPLDYGLRRLDHAVGNVPELGPAVSYVKSFTGFHEFAEFTAEDVGTSESGLNSVVLANNEEMVLLPMNEPVFGTKRKSQIQTYLEHNEGAGVQHLALVSEDIFKTLREMRKRSFVGGFEFMPSPPPTYYKKLKQRAGDILSDEQIKECEELGILVDRDDQGTLLQIFTKPVGDRPTIFIEIIQRIGCMVKDEEGKQYQKGGCGGFGKGNFSELFKSIEEYEKSLEAKQSQNP

SEQ ID NO: 34 - DNA, 1311 bp, Gossypium hirsutum
  GsHPPD-01 Nucleotide Sequence
atggtccagacaaaccagtctggttccggcaatgatttcaagctcgtcggattctcgaatttcgtccggtcaaatccaaaatccgatcggttcaccgtcaaacgtttccaccacatcgagttttggtgtaccgacgccactaacgtcgctcgccgtttttcatggggtctcggtatgcaatttgtagctaaatcggatttatccaccggaaatttgacccatgcttcttatctcctccgttcccgtgacctgaacttccttttcactgccccctattccccttctattgccgttgctcaaaacctctcccctcaatccaccgcttcgatcccttcttttgatcattcactctgccgctccttcgctgccacccacggcttaggcgttcgcgccatcgccatcgaagttgacgatgccgaaaccgctttcaccaccagtgtcacacatggcgcgttacccttttgccctcctaccccactcggcgacgtcgccactatcgccgaagtcaaactctacggcgacgtcgttttgcgttacgtcagttacaccaccaccataaactccgaccatgatttcttgccgggattcgagaaaatagaagacaccctttcttaccctttagattacggactccgacgactcgaccacgccgtcggcaacgtcccagaactcggtcccgctgtttcgtacgttaaatccttcaccggcttccacgaattcgctgaattcacagctgaagacgtcggaactagcgaaagtggactaaactccgtcgttttagctaacaacgaagaaatggtattacttccgatgaacgaaccggtgttcggaacaaaaaggaaaagccaaatccaaacgtatttagaacacaacgaaggtgccggagttcaacatttggcattggtgagtgaagatatattcaagacgttaagagaaatgaggaagagaagcttcgtcggcggttttgagttcatgccgtcgccgccgccgacttattataaaaaattgaagcaaagggcaggggatattttgagtgatgaacagattaaagagtgtgaagaactggggattctggttgatagagatgatcaagggactttgctgcaaattttcactaagccagttggtgataggccaaccatcttcatagagataatacaaagaattgggtgcatggtgaaggatgaagaaggaaagcaataccaaaaaggtggatgtggtggttttgggaaaggcaacttttctgagctcttcaaatccattgaagaatatgagaaatctcttgaagccaaacaatctcagaatccatga

SEQ ID NO: 35 - DNA, 1311 bp, Artificial Sequence
  GsHPPD-02 Nucleotide Sequence
atggtgcagacaaaccaatccggctctggaaatgacttcaagcttgtgggcttcagcaacttcgttaggtccaatcctaagtctgacagattcaccgttaagaggttccaccatattgagttctggtgcacagatgccaccaacgtggctaggcgcttctcatggggtctcggcatgcagttcgttgccaagagcgacctctcaactggcaacctgacacacgctagctacctcctgcgctcaagagatctcaatttcctgttcactgccccctacagcccatcaattgccgtggctcagaatctctccccacaatctactgctagcatcccttcattcgatcacagcctttgcaggtcattcgccgctacacatggattgggtgtgcgcgccattgctatcgaggttgatgacgccgagactgctttcaccactagcgtgacacacggcgcccttcctttctgcccacctacccccttgggagacgtggccactatcgctgaggttaagctctacggcgatgtggttctgcgctacgtttcctacacaaccactattaactctgatcatgacttcctccccggtttcgagaagatcgaggatactctttcctacccattggactacggccttagaaggttggatcacgccgtgggcaatgttcctgagctgggacccgctgtgtcctacgttaagtctttcacaggcttccatgagttcgccgagttcaccgctgaggacgtgggaacttccgagtctggtcttaactctgtggttttggccaacaatgaggagatggtgcttttgcctatgaacgagcctgttttcggaacaaagcgcaagtcccagattcaaacctaccttgagcacaacgagggcgccggagtgcagcatcttgctttggtttctgaggatatcttcaagaccttgagagagatgaggaagcgcagcttcgttggcggattcgagttcatgccttcacccccacctacttactacaagaagctcaagcagagagctggagatattctgtccgacgagcaaatcaaggagtgcgaggagctcggaattctggtggacagggatgaccagggtacactcctgcaaatcttcaccaagcccgttggcgatcgcccaaccattttcatcgagattatccaaagaattggttgcatggtgaaggacgaggagggcaagcagtaccaaaagggtggctgcggaggtttcggcaagggcaacttctccgagctcttcaagtctatcgaggagtacgagaagagcctggaggctaagcagtcacaaaatccctga

SEQ ID NO: 36 - protein, 436 aa, Artificial Sequence
  GsHPPDm-F372A Amino Acid Sequence
MVQTNQSGSGNDFKLVGFSNFVRSNPKSDRFTVKRFHHIEFWCTDATNVARRFSWGLGMQFVAKSDLSTGNLTHASYLLRSRDLNFLFTAPYSPSIAVAQNLSPQSTASIPSFDHSLCRSFAATHGLGVRAIAIEVDDAETAFTTSVTHGALPFCPPTPLGDVATIAEVKLYGDVVLRYVSYTTTINSDHDFLPGFEKIEDTLSYPLDYGLRRLDHAVGNVPELGPAVSYVKSFTGFHEFAEFTAEDVGTSESGLNSVVLANNEEMVLLPMNEPVFGTKRKSQIQTYLEHNEGAGVQHLALVSEDIFKTLREMRKRSFVGGFEFMPSPPPTYYKKLKQRAGDILSDEQIKECEELGILVDRDDQGTLLQIATKPVGDRPTIFIEIIQRIGCMVKDEEGKQYQKGGCGGFGKGNFSELFKSIEEYEKSLEAKQSQNP

SEQ ID NO: 37 - DNA, 1311 bp, Artificial Sequence
  GsHPPDm-F372A-01 Nucleotide Sequence
atggtccagacaaaccagtctggttccggcaatgatttcaagctcgtcggattctcgaatttcgtccggtcaaatccaaaatccgatcggttcaccgtcaaacgtttccaccacatcgagttttggtgtaccgacgccactaacgtcgctcgccgtttttcatggggtctcggtatgcaatttgtagctaaatcggatttatccaccggaaatttgacccatgcttcttatctcctccgttcccgtgacctgaacttccttttcactgccccctattccccttctattgccgttgctcaaaacctctcccctcaatccaccgcttcgatcccttcttttgatcattcactctgccgctccttcgctgccacccacggcttaggcgttcgcgccatcgccatcgaagttgacgatgccgaaaccgctttcaccaccagtgtcacacatggcgcgttacccttttgccctcctaccccactcggcgacgtcgccactatcgccgaagtcaaactctacggcgacgtcgttttgcgttacgtcagttacaccaccaccataaactccgaccatgatttcttgccgggattcgagaaaatagaagacaccctttcttaccctttagattacggactccgacgactcgaccacgccgtcggcaacgtcccagaactcggtcccgctgtttcgtacgttaaatccttcaccggcttccacgaattcgctgaattcacagctgaagacgtcggaactagcgaaagtggactaaactccgtcgttttagctaacaacgaagaaatggtattacttccgatgaacgaaccggtgttcggaacaaaaaggaaaagccaaatccaaacgtatttagaacacaacgaaggtgccggagttcaacatttggcattggtgagtgaagatatattcaagacgttaagagaaatgaggaagagaagcttcgtcggcggttttgagttcatgccgtcgccgccgccgacttattataaaaaattgaagcaaagggcaggggatattttgagtgatgaacagattaaagagtgtgaagaactggggattctggttgatagagatgatcaagggactttgctgcaaattgctactaagccagttggtgataggccaaccatcttcatagagataatacaaagaattgggtgcatggtgaaggatgaagaaggaaagcaataccaaaaaggtggatgtggtggttttgggaaaggcaacttttctgagctcttcaaatccattgaagaatatgagaaatctcttgaagccaaacaatctcagaatccatga

SEQ ID NO: 38 - DNA, 1311 bp, Artificial Sequence
  GsHPPDm-F372A-02 Nucleotide Sequence
atggtgcagacaaaccaatccggctctggaaatgacttcaagcttgtgggcttcagcaacttcgttaggtccaatcctaagtctgacagattcaccgttaagaggttccaccatattgagttctggtgcacagatgccaccaacgtggctaggcgcttctcatggggtctcggcatgcagttcgttgccaagagcgacctctcaactggcaacctgacacacgctagctacctcctgcgctcaagagatctcaatttcctgttcactgccccctacagcccatcaattgccgtggctcagaatctctccccacaatctactgctagcatcccttcattcgatcacagcctttgcaggtcattcgccgctacacatggattgggtgtgcgcgccattgctatcgaggttgatgacgccgagactgctttcaccactagcgtgacacacggcgcccttcctttctgcccacctacccccttgggagacgtggccactatcgctgaggttaagctctacggcgatgtggttctgcgctacgtttcctacacaaccactattaactctgatcatgacttcctccccggtttcgagaagatcgaggatactctttcctacccattggactacggccttagaaggttggatcacgccgtgggcaatgttcctgagctgggacccgctgtgtcctacgttaagtctttcacaggcttccatgagttcgccgagttcaccgctgaggacgtgggaacttccgagtctggtcttaactctgtggttttggccaacaatgaggagatggtgcttttgcctatgaacgagcctgttttcggaacaaagcgcaagtcccagattcaaacctaccttgagcacaacgagggcgccggagtgcagcatcttgctttggtttctgaggatatcttcaagaccttgagagagatgaggaagcgcagcttcgttggcggattcgagttcatgccttcacccccacctacttactacaagaagctcaagcagagagctggagatattctgtccgacgagcaaatcaaggagtgcgaggagctcggaattctggtggacagggatgaccagggtacactcctgcaaatcgctaccaagcccgttggcgatcgcccaaccattttcatcgagattatccaaagaattggttgcatggtgaaggacgaggagggcaagcagtaccaaaagggtggctgcggaggtttcggcaagggcaacttctccgagctcttcaagtctatcgaggagtacgagaagagcctggaggctaagcagtcacaaaatccctga

SEQ ID NO: 39 - protein, 436 aa, Triticum aestivum
  TaHPPD Amino Acid Sequence
MPPTPTTPAATGAGAAAAVTPEHARPRRMVRFNPRSDRFHTLSFHHVEFWCADAASAAGRFAFALGAPLAARSDLSTGNSVHASQLLRSGNLAFLFTAPYANGCDAATASLPSFSADAARRFSADHGLAVRSIALRVADAAEAFRASVDGGARPAFSPVDLGRGFGFAEVELYGDVVLRFVSHPDGTDVPFLPGFEGVSNPGAVDYGLTRFDHVVGNVPELASAAAYVAGFTGFHEFAEFTTEDVGTAESGLNSMVLANNSEGVLLPLNEPVHGTKRRSQIQTFLEHHGGPGVQHIAVASSDVLRTLREMRARSAMGGFDFLPPPLPKYYEGVRRIAGDVLSEAQIKECQELGVLVDRDDQGVLLQIFTKPVGDRPTLFLEMIQRIGCMEKDERGEEYQKGGCGGFGKGNFSELFKSIEDYEKSLEAKQSAAVQGS

SEQ ID NO: 40 - DNA, 1311 bp, Triticum aestivum
  TaHPPD-01 Nucleotide Sequence
atgccgcccacccccaccacccccgcagccaccggcgccggcgctgccgccgcggtgacgccggagcacgcgcggccgcgccgaatggtccgcttcaacccgcgcagcgaccgcttccacacgctctccttccaccacgtcgagttctggtgcgcggacgccgcctccgccgccggccgcttcgccttcgcgctcggcgcgccgctcgccgccaggtccgacctctccacggggaactccgtgcacgcctcccagctgctccgctcgggcaacctcgccttcctcttcaccgcgccctacgccaacggctgcgacgccgccaccgcctccctgccctccttctccgccgacgccgcgcgccggttctccgcggaccacgggctcgcggtgcgctccatagcgctgcgcgtcgcggacgccgccgaggccttccgcgccagcgtcgacgggggcgcgcgcccggccttcagccccgtggacctcggccgcggcttcggctttgcggaggtcgagctctacggcgacgtcgtgctccgcttcgtcagccatccggacggcacggacgtgcccttcttgccggggttcgagggcgtgagcaacccgggtgccgtggactacggcctgacacggtttgaccacgtcgtcggcaacgtcccggagcttgcttccgccgccgcctacgtagccggcttcacgggtttccatgagttcgccgagttcacgacggaggacgtgggcacggccgagagcgggctcaactcgatggtgctcgccaacaactcggagggcgtgctgctgccgctcaacgagccggtgcacggcaccaagcgccggagccagatacagacgttcctggaacaccacggcggcccgggtgtgcagcacatcgcggtggccagcagcgacgtgctcaggacgctcagggagatgcgtgcgcgctccgccatgggcggcttcgacttcctgccacccccgctgccgaagtactacgaaggcgtgcggcgcatcgccggggatgtgctctcggaggcgcagatcaaggaatgccaggagctgggggtgctcgtcgacagggacgaccaaggggtgttgctacaaatcttcacaaagccagtgggggacaggccaacgctgttcctggagatgatccaaaggatcgggtgcatggagaaggacgagagaggggaagagtaccagaagggtggctgcggcgggttcggcaaaggcaacttctccgagctgttcaagtccattgaagattacgagaagtcccttgaagccaagcaatctgctgcagttcagggatcatag

SEQ ID NO: 41 - DNA, 1311 bp, Artificial Sequence
  TaHPPD-02 Nucleotide Sequence
atgccacctactcccactacacctgctgctactggagctggtgctgctgcagctgttactccagagcatgctagaccaaggagaatggttagattcaacccacgctcagatagattccataccctttccttccaccatgttgagttctggtgcgctgatgctgcttctgctgctggacgcttcgctttcgcccttggagctcctttggccgctagatccgatctgtctaccggtaatagcgtgcacgcttcacagctcctgcgctctggcaacctcgccttcctgttcactgctccctacgccaatggctgcgacgccgctacagctagcctcccaagcttctcagccgatgccgctagaaggttctctgctgaccatggacttgccgttagaagcattgctttgagggtggccgatgccgctgaggctttcagggcttcagttgatggcggagctagaccagccttctcccctgttgatcttggcaggggattcggtttcgccgaggtggagctctacggagacgtggttctgcgcttcgtttctcaccctgatggtactgacgtgcctttcttgcccggtttcgagggcgttagcaaccccggcgctgtggattacggacttacaaggttcgaccacgtggttggcaatgtgcctgagttggcttccgccgctgcctacgttgccggattcaccggtttccatgagttcgctgagttcacaaccgaggatgttggtactgccgagtccggccttaactctatggttttggctaacaattcagagggcgtgcttttgcccctcaatgagccagttcacggaaccaagcgcagatcccagattcaaactttcctggagcaccatggtggccctggtgtgcaacatatcgctgttgcctcctctgatgtgcttaggactttgcgcgagatgagagctagatcagccatgggaggtttcgatttcctcccaccaccactcccaaagtactacgagggagttaggcgcattgctggtgacgtgctgtccgaggcccagatcaaggagtgccaagagctcggagtgctggttgatagagatgaccagggtgtgctcctgcaaattttcacaaagccagttggcgacaggcctacccttttcttggagatgattcagagaatcggttgcatggagaaggatgagaggggcgaggagtaccaaaagggcggatgcggtggcttcggcaagggaaacttcagcgagctcttcaagtcaatcgaggactacgagaagtccctggaggccaagcagtctgctgccgtgcaaggcagctga

SEQ ID NO: 42 - protein, 436 aa, Artificial Sequence
  TaHPPDm-F372A Amino Acid Sequence
MPPTPTTPAATGAGAAAAVTPEHARPRRMVRFNPRSDRFHTLSFHHVEFWCADAASAAGRFAFALGAPLAARSDLSTGNSVHASQLLRSGNLAFLFTAPYANGCDAATASLPSFSADAARRFSADHGLAVRSIALRVADAAEAFRASVDGGARPAFSPVDLGRGFGFAEVELYGDVVLRFVSHPDGTDVPFLPGFEGVSNPGAVDYGLTRFDHVVGNVPELASAAAYVAGFTGFHEFAEFTTEDVGTAESGLNSMVLANNSEGVLLPLNEPVHGTKRRSQIQTFLEHHGGPGVQHIAVASSDVLRTLREMRARSAMGGFDFLPPPLPKYYEGVRRIAGDVLSEAQIKECQELGVLVDRDDQGVLLQIATKPVGDRPTLFLEMIQRIGCMEKDERGEEYQKGGCGGFGKGNFSELFKSIEDYEKSLEAKQSAAVQGS

SEQ ID NO: 43 - DNA, 1311 bp, Artificial Sequence
  TaHPPDm-F372A-01 Nucleotide Sequence
atgccgcccacccccaccacccccgcagccaccggcgccggcgctgccgccgcggtgacgccggagcacgcgcggccgcgccgaatggtccgcttcaacccgcgcagcgaccgcttccacacgctctccttccaccacgtcgagttctggtgcgcggacgccgcctccgccgccggccgcttcgccttcgcgctcggcgcgccgctcgccgccaggtccgacctctccacggggaactccgtgcacgcctcccagctgctccgctcgggcaacctcgccttcctcttcaccgcgccctacgccaacggctgcgacgccgccaccgcctccctgccctccttctccgccgacgccgcgcgccggttctccgcggaccacgggctcgcggtgcgctccatagcgctgcgcgtcgcggacgccgccgaggccttccgcgccagcgtcgacgggggcgcgcgcccggccttcagccccgtggacctcggccgcggcttcggctttgcggaggtcgagctctacggcgacgtcgtgctccgcttcgtcagccatccggacggcacggacgtgcccttcttgccggggttcgagggcgtgagcaacccgggtgccgtggactacggcctgacacggtttgaccacgtcgtcggcaacgtcccggagcttgcttccgccgccgcctacgtagccggcttcacgggtttccatgagttcgccgagttcacgacggaggacgtgggcacggccgagagcgggctcaactcgatggtgctcgccaacaactcggagggcgtgctgctgccgctcaacgagccggtgcacggcaccaagcgccggagccagatacagacgttcctggaacaccacggcggcccgggtgtgcagcacatcgcggtggccagcagcgacgtgctcaggacgctcagggagatgcgtgcgcgctccgccatgggcggcttcgacttcctgccacccccgctgccgaagtactacgaaggcgtgcggcgcatcgccggggatgtgctctcggaggcgcagatcaaggaatgccaggagctgggggtgctcgtcgacagggacgaccaaggggtgttgctacaaatcgctacaaagccagtgggggacaggccaacgctgttcctggagatgatccaaaggatcgggtgcatggagaaggacgagagaggggaagagtaccagaagggtggctgcggcgggttcggcaaaggcaacttctccgagctgttcaagtccattgaagattacgagaagtcccttgaagccaagcaatctgctgcagttcagggatcatag

SEQ ID NO: 44 - DNA, 1311 bp, Artificial Sequence
  TaHPPDm-F372A-02 Nucleotide Sequence
atgccacctactcccactacacctgctgctactggagctggtgctgctgcagctgttactccagagcatgctagaccaaggagaatggttagattcaacccacgctcagatagattccataccctttccttccaccatgttgagttctggtgcgctgatgctgcttctgctgctggacgcttcgctttcgcccttggagctcctttggccgctagatccgatctgtctaccggtaatagcgtgcacgcttcacagctcctgcgctctggcaacctcgccttcctgttcactgctccctacgccaatggctgcgacgccgctacagctagcctcccaagcttctcagccgatgccgctagaaggttctctgctgaccatggacttgccgttagaagcattgctttgagggtggccgatgccgctgaggctttcagggcttcagttgatggcggagctagaccagccttctcccctgttgatcttggcaggggattcggtttcgccgaggtggagctctacggagacgtggttctgcgcttcgtttctcaccctgatggtactgacgtgcctttcttgcccggtttcgagggcgttagcaaccccggcgctgtggattacggacttacaaggttcgaccacgtggttggcaatgtgcctgagttggcttccgccgctgcctacgttgccggattcaccggtttccatgagttcgctgagttcacaaccgaggatgttggtactgccgagtccggccttaactctatggttttggctaacaattcagagggcgtgcttttgcccctcaatgagccagttcacggaaccaagcgcagatcccagattcaaactttcctggagcaccatggtggccctggtgtgcaacatatcgctgttgcctcctctgatgtgcttaggactttgcgcgagatgagagctagatcagccatgggaggtttcgatttcctcccaccaccactcccaaagtactacgagggagttaggcgcattgctggtgacgtgctgtccgaggcccagatcaaggagtgccaagagctcggagtgctggttgatagagatgaccagggtgtgctcctgcaaattgctacaaagccagttggcgacaggcctacccttttcttggagatgattcagagaatcggttgcatggagaaggatgagaggggcgaggagtaccaaaagggcggatgcggtggcttcggcaagggaaacttcagcgagctcttcaagtcaatcgaggactacgagaagtccctggaggccaagcagtctgctgccgtgcaaggcagctga

SEQ ID NO: 45 - protein, 436 aa, Brachypodium distachyon
  BdHPPD Amino Acid Sequence
MPPPATTAAPAAAAVTPEHARPPRRVARVNPRSDRFSALSFHHVELWCADAASAAGRFSFALGAPPAARSDLSTGNSAHASILLRSGSLAFLFTAPYAPSPASDSAASIPSFSASAARQFTADHGGLAVRAVALRVSSASDAFHASVSAGARPSFPPADLGQGFALAEVELYGDVVLRFISHPDENTEIPFLPGFESVSNPGASTYGLTRFDHVVGNVPSLAPVAAYIAGFTGFHEFAEFTAEDVGTADSGLNSVVLANNSERVLLPLNEPVHGTKRRSQIQTYLDHHGGPGVQHIALASDDVLRTLREMRARSAMGGFEFLAPPPPNYYDGVRRRAGDVLSEAQIKECQELGVLVDRDDQGVLLQIFTKPVGDRPTLFLEMIQRIGCMEKDEIGQEQQKGGCGGFGKGNFSELFRSIEEYEKSLEAKQSAVVQES

SEQ ID NO: 46 - DNA, 1311 bp, Brachypodium distachyon
  BdHPPD-01 Nucleotide Sequence
atgccgccccctgcgactaccgccgcccccgccgccgcggcggtgacgccggagcacgcgaggcctccccgccgcgtggcccgcgtcaacccgcggagcgaccgcttcagcgcgctctccttccaccacgtggagctctggtgcgcggacgccgcctccgccgcgggccgcttctccttcgcgctcggcgcgccgcccgccgcccgctccgacctctccacggggaactccgcgcacgcctccatcctcctccgctcgggatccctcgccttcctcttcaccgccccatacgccccctcccccgcatccgattccgccgcctccatcccctccttctccgcctccgccgcgcgccagttcaccgccgaccacggcggcctggccgtgcgcgccgtcgccctccgcgtctcctccgcctccgacgccttccacgccagcgtctccgccggcgcgcgcccctccttcccacccgccgacctcggccagggcttcgcgctcgccgaagtcgagctctacggcgacgtcgttctccgcttcatcagccaccccgacgaaaacaccgaaatccccttcctcccaggtttcgaatccgtcagcaaccccggcgcgtccacctacgggctcacgcggttcgaccacgtggtgggcaacgtgccgtccctcgcccccgtcgccgcctacatcgccggcttcaccgggttccacgagttcgccgagttcacggccgaggacgtgggcacggccgactccgggctcaactcggtggtgctcgccaacaactcggagcgggtgctgctgccgctcaacgagcccgtgcacggcaccaagcgccgcagccagatccagacgtacctcgaccaccacggcgggcccggcgtgcagcacatcgcgctcgccagcgacgacgtgctcaggacgctcagggagatgcgcgcgcgctccgccatgggcggcttcgagttcctcgcgccgccgccgcctaattactacgacggcgtgcggcgacgcgcaggggatgtgctctccgaggcgcagattaaggaatgccaggagcttggggtgctcgtcgacagggatgaccaaggggtgctgctccagatcttcaccaagccagtcggggacaggccaacgttgttcctggagatgatccaaaggatcgggtgcatggagaaggacgagatcggacaagagcaacagaagggtggctgcggcgggtttggcaagggcaacttctcggagctgttcaggtccatcgaagagtatgagaaatcccttgaagccaagcaatctgctgtagttcaggaatcctag

SEQ ID NO: 47 - DNA, 1311 bp, Artificial Sequence
  BdHPPD-02 Nucleotide Sequence
atgccacctcccgctaccactgctgctcctgctgctgctgctgtgacaccagagcatgctaggccacctaggagagtggctagagttaaccctaggagcgatcgcttctctgctcttagcttccaccatgttgagctttggtgcgctgatgctgcttcagctgctggacgcttctccttcgctcttggtgctcccccagctgctagatcagacttgtccactggaaattctgcccatgctagcattctcctgagaagcggttcactcgctttcctgttcacagctccttatgctccttcccctgcttctgattctgctgcttctatccccagcttctcagcttccgccgctaggcagttcaccgctgatcatggcggacttgccgtgcgcgccgttgctctgagagtgtcctctgccagcgacgctttccatgcctctgttagcgccggagctaggccatcattccctcccgccgatctcggacaaggtttcgcccttgctgaggtggagttgtacggcgatgtggttcttcgcttcatttcacaccctgacgagaacaccgagatcccattcttgcctggcttcgagtcagtttccaatccaggagctagcacatacggtcttacccgcttcgaccacgtggttggcaacgtgccctcattggctccagttgccgcttacattgccggtttcactggcttccatgagttcgctgagttcactgccgaggatgtgggcacagctgactcaggactcaactccgtggttctggccaacaattccgagagagtgcttttgcctctgaatgagcccgttcacggcaccaagagaaggtctcagattcaaacttacctcgatcaccatggtggccctggagtgcagcatatcgccctggcttccgatgacgttcttagaactttgagggagatgcgcgctagatctgccatgggaggtttcgagttccttgccccacctcccccaaactactacgatggtgtgcgcagaagggctggcgacgttctgtctgaggcccagattaaggagtgccaagagctcggtgtgctggttgatcgcgatgaccagggcgtgctcctgcaaatcttcacaaagccagttggcgacagacctacccttttcttggagatgattcagaggatcggctgcatggagaaggacgagattggacaagagcagcaaaagggcggatgcggtggcttcggcaagggaaatttctctgagctcttcaggagcatcgaggagtacgagaagtctctggaggctaagcagagcgccgtggttcaagagtcatga

SEQ ID NO: 48 - protein, 436 aa, Artificial Sequence
  BdHPPDm-F372A Amino Acid Sequence
MPPPATTAAPAAAAVTPEHARPPRRVARVNPRSDRFSALSFHHVELWCADAASAAGRFSFALGAPPAARSDLSTGNSAHASILLRSGSLAFLFTAPYAPSPASDSAASIPSFSASAARQFTADHGGLAVRAVALRVSSASDAFHASVSAGARPSFPPADLGQGFALAEVELYGDVVLRFISHPDENTEIPFLPGFESVSNPGASTYGLTRFDHVVGNVPSLAPVAAYIAGFTGFHEFAEFTAEDVGTADSGLNSVVLANNSERVLLPLNEPVHGTKRRSQIQTYLDHHGGPGVQHIALASDDVLRTLREMRARSAMGGFEFLAPPPPNYYDGVRRRAGDVLSEAQIKECQELGVLVDRDDQGVLLQIATKPVGDRPTLFLEMIQRIGCMEKDEIGQEQQKGGCGGFGKGNFSELFRSIEEYEKSLEAKQSAVVQES

SEQ ID NO: 49 - DNA, 1311 bp, Artificial Sequence
  BdHPPDm-F372A-01 Nucleotide Sequence
atgccgccccctgcgactaccgccgcccccgccgccgcggcggtgacgccggagcacgcgaggcctccccgccgcgtggcccgcgtcaacccgcggagcgaccgcttcagcgcgctctccttccaccacgtggagctctggtgcgcggacgccgcctccgccgcgggccgcttctccttcgcgctcggcgcgccgcccgccgcccgctccgacctctccacggggaactccgcgcacgcctccatcctcctccgctcgggatccctcgccttcctcttcaccgccccatacgccccctcccccgcatccgattccgccgcctccatcccctccttctccgcctccgccgcgcgccagttcaccgccgaccacggcggcctggccgtgcgcgccgtcgccctccgcgtctcctccgcctccgacgccttccacgccagcgtctccgccggcgcgcgcccctccttcccacccgccgacctcggccagggcttcgcgctcgccgaagtcgagctctacggcgacgtcgttctccgcttcatcagccaccccgacgaaaacaccgaaatccccttcctcccaggtttcgaatccgtcagcaaccccggcgcgtccacctacgggctcacgcggttcgaccacgtggtgggcaacgtgccgtccctcgcccccgtcgccgcctacatcgccggcttcaccgggttccacgagttcgccgagttcacggccgaggacgtgggcacggccgactccgggctcaactcggtggtgctcgccaacaactcggagcgggtgctgctgccgctcaacgagcccgtgcacggcaccaagcgccgcagccagatccagacgtacctcgaccaccacggcgggcccggcgtgcagcacatcgcgctcgccagcgacgacgtgctcaggacgctcagggagatgcgcgcgcgctccgccatgggcggcttcgagttcctcgcgccgccgccgcctaattactacgacggcgtgcggcgacgcgcaggggatgtgctctccgaggcgcagattaaggaatgccaggagcttggggtgctcgtcgacagggatgaccaaggggtgctgctccagatcgctaccaagccagtcggggacaggccaacgttgttcctggagatgatccaaaggatcgggtgcatggagaaggacgagatcggacaagagcaacagaagggtggctgcggcgggtttggcaagggcaacttctcggagctgttcaggtccatcgaagagtatgagaaatcccttgaagccaagcaatctgctgtagttcaggaatcctag

SEQ ID NO: 50 - DNA, 1311 bp, Artificial Sequence
  BdHPPDm-F372A-02 Nucleotide Sequence
atgccacctcccgctaccactgctgctcctgctgctgctgctgtgacaccagagcatgctaggccacctaggagagtggctagagttaaccctaggagcgatcgcttctctgctcttagcttccaccatgttgagctttggtgcgctgatgctgcttcagctgctggacgcttctccttcgctcttggtgctcccccagctgctagatcagacttgtccactggaaattctgcccatgctagcattctcctgagaagcggttcactcgctttcctgttcacagctccttatgctccttcccctgcttctgattctgctgcttctatccccagcttctcagcttccgccgctaggcagttcaccgctgatcatggcggacttgccgtgcgcgccgttgctctgagagtgtcctctgccagcgacgctttccatgcctctgttagcgccggagctaggccatcattccctcccgccgatctcggacaaggtttcgcccttgctgaggtggagttgtacggcgatgtggttcttcgcttcatttcacaccctgacgagaacaccgagatcccattcttgcctggcttcgagtcagtttccaatccaggagctagcacatacggtcttacccgcttcgaccacgtggttggcaacgtgccctcattggctccagttgccgcttacattgccggtttcactggcttccatgagttcgctgagttcactgccgaggatgtgggcacagctgactcaggactcaactccgtggttctggccaacaattccgagagagtgcttttgcctctgaatgagcccgttcacggcaccaagagaaggtctcagattcaaacttacctcgatcaccatggtggccctggagtgcagcatatcgccctggcttccgatgacgttcttagaactttgagggagatgcgcgctagatctgccatgggaggtttcgagttccttgccccacctcccccaaactactacgatggtgtgcgcagaagggctggcgacgttctgtctgaggcccagattaaggagtgccaagagctcggtgtgctggttgatcgcgatgaccagggcgtgctcctgcaaatcgctacaaagccagttggcgacagacctacccttttcttggagatgattcagaggatcggctgcatggagaaggacgagattggacaagagcagcaaaagggcggatgcggtggcttcggcaagggaaatttctctgagctcttcaggagcatcgaggagtacgagaagtctctggaggctaagcagagcgccgtggttcaagagtcatga

SEQ ID NO: 51 - protein, 434 aa, Hordeum vulgare
  HvHPPD Amino Acid Sequence
MPPTPTTPAATGAAAAVTPEHARPHRMVRFNPRSDRFHTLSFHHVEFWCADAASAAGRFAFALGAPLAARSDLSTGNSAHASQLLRSGSLAFLFTAPYANGCDAATASLPSFSADAARRFSADHGIAVRSVALRVADAAEAFRASRRRGARPAFAPVDLGRGFAFAEVELYGDVVLRFVSHPDGTDVPFLPGFEGVTNPDAVDYGLTRFDHVVGNVPELAPAAAYIAGFTGFHEFAEFTAEDVGTTESGLNSVVLANNSEGVLLPLNEPVHGTKRRSQIQTFLEHHGGPGVQHIAVASSDVLRTLRKMRARSAMGGFDFLPPPLPKYYEGVRRLAGDVLSEAQIKECQELGVLVDRDDQGVLLQIFTKPVGDRPTLFLEMIQRIGCMEKDERGEEYQKGGCGGFGKGNFSELFKSIEDYEKSLEAKQSAAVQGS

SEQ ID NO: 52 - DNA, 1305 bp, Hordeum vulgare
  HvHPPD-01 Nucleotide Sequence
atgccgcccacccccaccacccccgcggctaccggcgccgccgccgcggtgacgccggagcacgcgcgaccgcaccgaatggtccgcttcaacccgcgcagcgaccgcttccacacgctctccttccaccacgtcgagttctggtgcgcggacgccgcctccgccgccggccgcttcgcgttcgcgctcggcgcgccgctcgccgccaggtccgacctctccacggggaactccgcgcacgcctcccagctgctccgctcgggctccctcgccttcctcttcaccgcgccctacgccaacggctgcgacgccgccaccgcctccctgccctccttctccgccgacgccgcgcgccggttctccgccgaccacgggatcgcggtgcgctccgtagcgctgcgcgtcgcagacgccgccgaggccttccgcgccagtcgtcgacggggcgcgcgcccggccttcgcccccgtggacctcggccgcggcttcgcgttcgcggaggtcgagctctacggcgacgtcgtgctccgcttcgtcagccacccggacggcacggacgtgcccttcttgccggggttcgagggcgtaaccaacccggacgccgtggactacggcctgacgcggttcgaccacgtcgtcggcaacgtcccggagcttgcccccgccgcagcctacatcgccgggttcacggggttccacgagttcgccgagttcacggcggaggacgtgggcacgaccgagagcgggctcaactcggtggtgctcgccaacaactcggagggcgtgctgctgccgctcaacgagccggtgcacggcaccaagcgccggagccagatacagacgttcctggaacaccacggcggcccgggcgtgcagcacatcgcggtggccagcagtgacgtgctcaggacgctcaggaagatgcgtgcgcgctccgccatgggcggcttcgacttcctgccacccccgctgccgaagtactacgaaggcgtgcgacgccttgccggggatgtcctctcggaggcgcagatcaaggaatgccaggagctgggtgtgctcgtcgatagggacgaccaaggggtgttgctccaaatcttcaccaagccagtaggggacaggccgaccttgttcctggagatgatccagaggatcgggtgcatggagaaggacgagagaggggaagagtaccagaagggtggctgcggcgggttcggcaaaggcaacttctccgagctgttcaagtccattgaagattacgagaagtcccttgaagccaagcaatctgctgcagttcagggatcatag

SEQ ID NO: 53 - DNA, 1305 bp, Artificial Sequence
  HvHPPD-02 Nucleotide Sequence
atgccacctactcccactacaccagctgctactggtgctgctgctgctgttaccccagagcacgctagacctcataggatggtgcgcttcaaccccagatctgataggttccacacactcagcttccaccatgttgagttctggtgcgctgatgctgcttcagctgctggcaggttcgctttcgctcttggtgccccattggctgctagatctgatctgtcaaccggcaactccgctcatgcctctcagctcctgaggagcggatcactcgccttcctgttcaccgctccttatgctaacggctgcgatgctgctactgcttctcttccctccttctctgccgatgccgctaggcgcttctcagctgaccacggtattgccgtgaggtccgttgctttgcgcgtggccgatgccgctgaggctttcagagcctctagaagacgcggcgctaggccagctttcgctcctgttgatcttggtagaggcttcgctttcgccgaggtggagctttacggtgacgtggttttgaggttcgttagccatccagatggcactgacgtgcctttcctgcccggcttcgagggagttactaaccctgatgccgtggactacggccttacacgcttcgatcacgtggttggaaatgttcccgagttggctccagccgctgcctacatcgccggtttcacaggcttccatgagttcgctgagttcaccgccgaggacgtgggaacaaccgagagcggtcttaactcagtggttttggctaacaattctgagggagttcttttgcctctcaatgagcccgtgcacggtactaagagaaggagccagattcaaacattcctggagcaccatggcggacctggcgtgcaacatatcgctgttgcctcctctgatgtgcttcgcaccttgagaaagatgagggctcgctcagccatgggtggcttcgatttcctcccaccaccactcccaaagtactacgagggcgttcgcagactcgctggagacgtgctgtccgaggcccagattaaggagtgccaagagctcggtgtgctggttgatcgcgatgaccagggcgttctcctgcaaatcttcaccaagcccgtgggagacagaccaactcttttcttggagatgattcagcgcatcggatgcatggagaaggatgagagaggtgaggagtaccaaaagggaggttgcggcggattcggaaagggtaatttctccgagctcttcaagtctattgaggactacgagaagagcctggaggccaagcagtcagctgccgtgcaaggctcctga

SEQ ID NO: 54 - protein, 434 aa, Artificial Sequence
  HvHPPDm-F372A Amino Acid Sequence
MPPTPTTPAATGAAAAVTPEHARPHRMVRFNPRSDRFHTLSFHHVEFWCADAASAAGRFAFALGAPLAARSDLSTGNSAHASQLLRSGSLAFLFTAPYANGCDAATASLPSFSADAARRFSADHGIAVRSVALRVADAAEAFRASRRRGARPAFAPVDLGRGFAFAEVELYGDVVLRFVSHPDGTDVPFLPGFEGVTNPDAVDYGLTRFDHVVGNVPELAPAAAYIAGFTGFHEFAEFTAEDVGTTESGLNSVVLANNSEGVLLPLNEPVHGTKRRSQIQTFLEHHGGPGVQHIAVASSDVLRTLRKMRARSAMGGFDFLPPPLPKYYEGVRRLAGDVLSEAQIKECQELGVLVDRDDQGVLLQIATKPVGDRPTLFLEMIQRIGCMEKDERGEEYQKGGCGGFGKGNFSELFKSIEDYEKSLEAKQSAAVQGS

SEQ ID NO: 55 - DNA, 1305 bp, Artificial Sequence
  F372A-01 Nucleotide Sequence
atgccgcccacccccaccacccccgcggctaccggcgccgccgccgcggtgacgccggagcacgcgcgaccgcaccgaatggtccgcttcaacccgcgcagcgaccgcttccacacgctctccttccaccacgtcgagttctggtgcgcggacgccgcctccgccgccggccgcttcgcgttcgcgctcggcgcgccgctcgccgccaggtccgacctctccacggggaactccgcgcacgcctcccagctgctccgctcgggctccctcgccttcctcttcaccgcgccctacgccaacggctgcgacgccgccaccgcctccctgccctccttctccgccgacgccgcgcgccggttctccgccgaccacgggatcgcggtgcgctccgtagcgctgcgcgtcgcagacgccgccgaggccttccgcgccagtcgtcgacggggcgcgcgcccggccttcgcccccgtggacctcggccgcggcttcgcgttcgcggaggtcgagctctacggcgacgtcgtgctccgcttcgtcagccacccggacggcacggacgtgcccttcttgccggggttcgagggcgtaaccaacccggacgccgtggactacggcctgacgcggttcgaccacgtcgtcggcaacgtcccggagcttgcccccgccgcagcctacatcgccgggttcacggggttccacgagttcgccgagttcacggcggaggacgtgggcacgaccgagagcgggctcaactcggtggtgctcgccaacaactcggagggcgtgctgctgccgctcaacgagccggtgcacggcaccaagcgccggagccagatacagacgttcctggaacaccacggcggcccgggcgtgcagcacatcgcggtggccagcagtgacgtgctcaggacgctcaggaagatgcgtgcgcgctccgccatgggcggcttcgacttcctgccacccccgctgccgaagtactacgaaggcgtgcgacgccttgccggggatgtcctctcggaggcgcagatcaaggaatgccaggagctgggtgtgctcgtcgatagggacgaccaaggggtgttgctccaaatcgctaccaagccagtaggggacaggccgaccttgttcctggagatgatccagaggatcgggtgcatggagaaggacgagagaggggaagagtaccagaagggtggctgcggcgggttcggcaaaggcaacttctccgagctgttcaagtccattgaagattacgagaagtcccttgaagccaagcaatctgctgcagttcagggatcatag

SEQ ID NO: 56 - DNA, 1305 bp, Artificial Sequence
  HvHPPDm-F372A-02 Nucleotide Sequence
atgccacctactcccactacaccagctgctactggtgctgctgctgctgttaccccagagcacgctagacctcataggatggtgcgcttcaaccccagatctgataggttccacacactcagcttccaccatgttgagttctggtgcgctgatgctgcttcagctgctggcaggttcgctttcgctcttggtgccccattggctgctagatctgatctgtcaaccggcaactccgctcatgcctctcagctcctgaggagcggatcactcgccttcctgttcaccgctccttatgctaacggctgcgatgctgctactgcttctcttccctccttctctgccgatgccgctaggcgcttctcagctgaccacggtattgccgtgaggtccgttgctttgcgcgtggccgatgccgctgaggctttcagagcctctagaagacgcggcgctaggccagctttcgctcctgttgatcttggtagaggcttcgctttcgccgaggtggagctttacggtgacgtggttttgaggttcgttagccatccagatggcactgacgtgcctttcctgcccggcttcgagggagttactaaccctgatgccgtggactacggccttacacgcttcgatcacgtggttggaaatgttcccgagttggctccagccgctgcctacatcgccggtttcacaggcttccatgagttcgctgagttcaccgccgaggacgtgggaacaaccgagagcggtcttaactcagtggttttggctaacaattctgagggagttcttttgcctctcaatgagcccgtgcacggtactaagagaaggagccagattcaaacattcctggagcaccatggcggacctggcgtgcaacatatcgctgttgcctcctctgatgtgcttcgcaccttgagaaagatgagggctcgctcagccatgggtggcttcgatttcctcccaccaccactcccaaagtactacgagggcgttcgcagactcgctggagacgtgctgtccgaggcccagattaaggagtgccaagagctcggtgtgctggttgatcgcgatgaccagggcgttctcctgcaaatcgctaccaagcccgtgggagacagaccaactcttttcttggagatgattcagcgcatcggatgcatggagaaggatgagagaggtgaggagtaccaaaagggaggttgcggcggattcggaaagggtaatttctccgagctcttcaagtctattgaggactacgagaagagcctggaggccaagcagtcagctgccgtgcaaggctcctga

SEQ ID NO: 57 - protein, 441 aa, Setaria italica
  SiHPPD Amino Acid Sequence
MPPTPTPAAAAPGAAAAPAAGDQAAFRLVGHRGFVRVNPRSDRFHTLSFHHVELWCADATSAAGRFSFGLGAPLAARSDLSTGNSAHASLLLRSGSLAFLFTAPYAHGVDAATASLPSFSAPAARSFAADHGLAVRAIGLRVADAEDAFRASVAAGARPAFKPVELGLGFRLAEVELYGDVVLRYVSYPDAEDAPFLPGFENVNNPGALNYGLRRFDHIVGNVPELAPVAAYVAGFTGFHEFAEFTAEDVGTAESGLNSMVLANNSETVLIPLNEPVHGTKRRSQIQTFLDHNGGPGVQHIALASDDVLRTLREMQARSAMGGFEFMAAPPPDYYEGVRRRAGDVLSEAQIKECQELGVLVDRDDQGVLLQIFTKPVGDRQTLFLEIIQRIGCMEKDEQGQEYQKGGCGGFGKGNFSQLFKSIEDYEKSLESKQAAAVQGS

SEQ ID NO: 58 - DNA, 1326 bp, Setaria italica
  SiHPPD-01 Nucleotide Sequence
atgcccccgaccccgacccccgccgccgccgcaccgggcgccgccgcggcgccggcagcgggggatcaggcggcgttccgcctcgtcggccaccgcggcttcgtccgcgtcaacccgcgctccgaccgcttccacacgctgtcgttccaccacgtcgagctctggtgcgccgacgccacgtccgccgccggccgcttctccttcgggctcggcgcgccgctcgccgcgcggtccgacctctccacggggaactccgcgcacgcctcgctcctgctccgctcgggctccctcgcgttcctcttcaccgcgccatacgcgcacggcgtcgacgccgcaaccgcatccctgccgtccttttccgcgcccgccgcgcggagcttcgcggccgaccacggcctcgcggtgcgcgccatcgggctccgcgtcgccgacgccgaggacgccttccgcgccagcgtcgccgccggcgcgcgccccgcgttcaagcccgtcgagctcggcctcgggttccgcctcgccgaggtcgagctctacggcgacgtcgtcctccgctacgtgagctacccggacgccgaggacgcgcccttcctgccgggcttcgagaacgtgaacaaccccggggcgctgaactacgggctcaggaggttcgaccacatcgtcggcaacgtcccggagctggcgccggtggccgcgtacgtcgccgggttcacggggttccacgaattcgccgagttcacggcggaggacgtgggcacggcggagagcgggctcaattcgatggtgctcgccaacaactccgagaccgtgctgatcccgctcaacgagcccgtccacggcaccaagcgccgcagccagatacagacgttcctggaccacaacggcggccccggcgtgcagcacatcgcgctggccagcgacgacgtgctcaggacgctgcgggagatgcaagcacgctcagccatgggcggattcgagttcatggcggctccaccgcccgactattacgaaggtgtgaggcggcgcgccggggacgtgctctcggaggctcagattaaggagtgccaggaactgggggtgctggtggacagggatgaccagggggtgttgctccaaatcttcaccaagccagtgggggacaggcaaacattgttcttggagataatacaaaggattgggtgcatggagaaggacgagcaggggcaggaataccagaagggtggttgtggcggttttggaaagggaaacttctcgcagctgttcaaatccattgaggactatgagaagtcccttgaatcaaagcaagctgctgcggttcagggatcctaa

SEQ ID NO: 59 - DNA, 1326 bp, Artificial Sequence
  SiHPPD-02 Nucleotide Sequence
atgccacctacccccactcctgctgctgctgctcctggtgctgctgctgctccagccgctggcgatcaggccgctttcaggctggttggtcacagaggcttcgtgagggttaaccctcgctccgatagattccatactctgtctttccaccatgtggagctttggtgcgctgatgctacatctgctgctggtcgcttctcattcggtctgggcgctccacttgccgctagatccgacttgtctactggtaattccgctcacgcctctctcctgcttagatccggctctctggccttccttttcacagctccttacgcccatggcgttgatgccgctaccgctagcctcccaagcttctcagcccctgccgctaggtcattcgctgctgaccatggattggctgtgcgcgccatcggactcagagttgctgatgccgaggatgctttcagggcttctgtggctgctggagctagaccagccttcaagcctgtggagctgggacttggtttcaggctggccgaggttgagctttacggcgatgtggttctgcgctacgtgtcttaccctgatgctgaggacgcccctttccttcccggattcgagaacgttaacaatcccggcgccttgaattacggactcaggcgcttcgatcacattgtgggcaacgttcccgagctggctccagtggccgcttacgttgccggattcaccggtttccatgagttcgctgagttcacagctgaggatgtgggtactgctgagtctggattgaactcaatggtgctcgccaacaatagcgagactgttttgattcctctcaatgagcccgtgcatggaactaagagaaggtcacagatccaaacattcttggaccacaatggcggacccggtgttcagcatattgctctcgcctccgatgacgtgctgaggactcttcgcgagatgcaagctcgctctgccatgggtggcttcgagttcatggccgctcccccacctgattactacgagggagtgcgcagaagggctggtgacgttcttagcgaggcccagatcaaggagtgccaagagttgggcgtgctcgttgatagggatgaccagggagttttgctccaaatcttcaccaagccagtgggagacagacagactttgttcctcgagattatccaaaggattggatgcatggagaaggatgagcagggtcaagagtaccagaagggaggttgcggcggattcggcaagggaaacttctcccaactgttcaagtctattgaggactacgagaagagccttgagtcaaagcaggccgctgccgtgcaaggctcctga

SEQ ID NO: 60 - protein, 441 aa, Artificial Sequence
  SiHPPDm-F372A Amino Acid Sequence
MPPTPTPAAAAPGAAAAPAAGDQAAFRLVGHRGFVRVNPRSDRFHTLSFHHVELWCADATSAAGRFSFGLGAPLAARSDLSTGNSAHASLLLRSGSLAFLFTAPYAHGVDAATASLPSFSAPAARSFAADHGLAVRAIGLRVADAEDAFRASVAAGARPAFKPVELGLGFRLAEVELYGDVVLRYVSYPDAEDAPFLPGFENVNNPGALNYGLRRFDHIVGNVPELAPVAAYVAGFTGFHEFAEFTAEDVGTAESGLNSMVLANNSETVLIPLNEPVHGTKRRSQIQTFLDHNGGPGVQHIALASDDVLRTLREMQARSAMGGFEFMAAPPPDYYEGVRRRAGDVLSEAQIKECQELGVLVDRDDQGVLLQIATKPVGDRQTLFLEIIQRIGCMEKDEQGQEYQKGGCGGFGKGNFSQLFKSIEDYEKSLESKQAAAVQGS

SEQ ID NO: 61 - DNA, 1326 bp, Artificial Sequence
  SiHPPDm-F372A-01 Nucleotide Sequence
atgcccccgaccccgacccccgccgccgccgcaccgggcgccgccgcggcgccggcagcgggggatcaggcggcgttccgcctcgtcggccaccgcggcttcgtccgcgtcaacccgcgctccgaccgcttccacacgctgtcgttccaccacgtcgagctctggtgcgccgacgccacgtccgccgccggccgcttctccttcgggctcggcgcgccgctcgccgcgcggtccgacctctccacggggaactccgcgcacgcctcgctcctgctccgctcgggctccctcgcgttcctcttcaccgcgccatacgcgcacggcgtcgacgccgcaaccgcatccctgccgtccttttccgcgcccgccgcgcggagcttcgcggccgaccacggcctcgcggtgcgcgccatcgggctccgcgtcgccgacgccgaggacgccttccgcgccagcgtcgccgccggcgcgcgccccgcgttcaagcccgtcgagctcggcctcgggttccgcctcgccgaggtcgagctctacggcgacgtcgtcctccgctacgtgagctacccggacgccgaggacgcgcccttcctgccgggcttcgagaacgtgaacaaccccggggcgctgaactacgggctcaggaggttcgaccacatcgtcggcaacgtcccggagctggcgccggtggccgcgtacgtcgccgggttcacggggttccacgaattcgccgagttcacggcggaggacgtgggcacggcggagagcgggctcaattcgatggtgctcgccaacaactccgagaccgtgctgatcccgctcaacgagcccgtccacggcaccaagcgccgcagccagatacagacgttcctggaccacaacggcggccccggcgtgcagcacatcgcgctggccagcgacgacgtgctcaggacgctgcgggagatgcaagcacgctcagccatgggcggattcgagttcatggcggctccaccgcccgactattacgaaggtgtgaggcggcgcgccggggacgtgctctcggaggctcagattaaggagtgccaggaactgggggtgctggtggacagggatgaccagggggtgttgctccaaatcgctaccaagccagtgggggacaggcaaacattgttcttggagataatacaaaggattgggtgcatggagaaggacgagcaggggcaggaataccagaagggtggttgtggcggttttggaaagggaaacttctcgcagctgttcaaatccattgaggactatgagaagtcccttgaatcaaagcaagctgctgcggttcagggatcctaa

SEQ ID NO: 62 - DNA, 1326 bp, Artificial Sequence
  SiHPPDm-F372A-02 Nucleotide Sequence
atgccacctacccccactcctgctgctgctgctcctggtgctgctgctgctccagccgctggcgatcaggccgctttcaggctggttggtcacagaggcttcgtgagggttaaccctcgctccgatagattccatactctgtctttccaccatgtggagctttggtgcgctgatgctacatctgctgctggtcgcttctcattcggtctgggcgctccacttgccgctagatccgacttgtctactggtaattccgctcacgcctctctcctgcttagatccggctctctggccttccttttcacagctccttacgcccatggcgttgatgccgctaccgctagcctcccaagcttctcagcccctgccgctaggtcattcgctgctgaccatggattggctgtgcgcgccatcggactcagagttgctgatgccgaggatgctttcagggcttctgtggctgctggagctagaccagccttcaagcctgtggagctgggacttggtttcaggctggccgaggttgagctttacggcgatgtggttctgcgctacgtgtcttaccctgatgctgaggacgcccctttccttcccggattcgagaacgttaacaatcccggcgccttgaattacggactcaggcgcttcgatcacattgtgggcaacgttcccgagctggctccagtggccgcttacgttgccggattcaccggtttccatgagttcgctgagttcacagctgaggatgtgggtactgctgagtctggattgaactcaatggtgctcgccaacaatagcgagactgttttgattcctctcaatgagcccgtgcatggaactaagagaaggtcacagatccaaacattcttggaccacaatggcggacccggtgttcagcatattgctctcgcctccgatgacgtgctgaggactcttcgcgagatgcaagctcgctctgccatgggtggcttcgagttcatggccgctcccccacctgattactacgagggagtgcgcagaagggctggtgacgttcttagcgaggcccagatcaaggagtgccaagagttgggcgtgctcgttgatagggatgaccagggagttttgctccaaatcgctaccaagccagtgggagacagacagactttgttcctcgagattatccaaaggattggatgcatggagaaggatgagcagggtcaagagtaccagaagggaggttgcggcggattcggcaagggaaacttctcccaactgttcaagtctattgaggactacgagaagagccttgagtcaaagcaggccgctgccgtgcaaggctcctga

SEQ ID NO: 63 - protein, 440 aa, Sorghum bicolor
  SbHPPD Amino Acid Sequence
MPPTPTTAAATGAAVAAASAEQAAFRLVGHRNFVRVNPRSDRFHTLAFHHVELWCADAASAAGRFSFGLGAPLAARSDLSTGNTAHASLLLRSGALAFLFTAPYAHGADAATASLPSFSAAEARRFAADHGLAVRAVALRVADAEDAFRASVAAGARPAFEPVELGLGFRLAEVELYGDVVLRYVSYPDDADASFLPGFVGVTSPGAADYGLRRFDHIVGNVPELAPAAAYFAGFTGFHEFAEFTAEDVGTTESGLNSMVLANNAENVLLPLNEPVHGTKRRSQIQTYLDHHGGPGVQHMALASDDVLRTLREMQARSAMGGFEFMAPPAPEYYDGVRRRAGDVLTEAQIKECQELGVLVDRDDQGVLLQIFTKPVGDRPTLFLEIIQRIGCMEKDEKGQEYQKGGCGGFGKGNFSQLFKSIEDYEKSLEAKQAAAAQGS

SEQ ID NO: 64 - DNA, 1323 bp, Sorghum bicolor
  SbHPPD-01 Nucleotide Sequence
atgcccccgacccccaccacagccgccgcaaccggcgccgccgtggcggcggcatcagcggagcaggcggcgttccgcctcgtgggccaccgcaacttcgtccgcgtgaacccgcgctccgaccgcttccacacgctcgcgttccaccacgtggagctctggtgcgccgacgcggcctccgccgcgggccgcttctccttcgggctcggcgcgccgctcgccgcgcggtccgacctctccacggggaacaccgcgcacgcgtccctgctgctccgctcgggcgccctcgcgttcctcttcacggcgccctacgcgcacggcgccgacgccgccacggcctcgctgccctccttctccgccgccgaggcgcggcgcttcgcggccgaccacggcctcgcggtgcgcgccgtcgcgctccgcgtggccgacgcggaggacgccttccgcgccagcgtcgcggccggcgcgcgcccggcgttcgagcccgtcgagctcggcctcggcttccgcctcgccgaagtcgagctctacggcgacgtcgtgctccggtacgtgagctacccggacgacgcggacgcgtccttcctgccggggttcgtgggcgtgaccagccccggcgcggcggactacgggctgaggaggttcgaccacatcgtcggcaacgtgccggagctggcgccggcggccgcctacttcgctggcttcacggggttccacgagttcgccgagttcacggcggaggacgtgggcaccacggagagcgggctcaactcgatggtgctcgccaacaacgcggagaacgtgctgctcccactcaacgagccggtgcacggcaccaagcgccgcagccagatacagacgtacttggaccaccacggcggccccggcgtgcagcacatggcgctggccagcgacgacgtgctcaggacgctgagggagatgcaagcgcgctcggccatgggcggcttcgagttcatggcgcctccggcgcccgaatactatgacggcgtgaggcggcgcgccggggacgtgctcacggaggcacagattaaggagtgtcaggaactaggggtgctggtggacagagatgaccagggcgtgctgctccagatcttcaccaagccagtgggggacaggccaacgttgttcttggagatcattcaaaggatcgggtgcatggagaaggatgagaaggggcaagaataccagaagggtggctgtggcgggtttggcaagggaaacttctcccagctgttcaaatccattgaggattatgagaagtcccttgaagctaagcaagctgcagcagctcagggatcctag

SEQ ID NO: 65 - DNA, 1323 bp, Artificial Sequence
  SbHPPD-02 Nucleotide Sequence
atgccacctactccaaccactgctgctgctactggtgctgctgtggctgcagcttctgctgagcaggctgctttccgcctggttggacaccgcaacttcgtgagagttaatcccagatcagatcgcttccataccttggccttccaccatgtggagctttggtgcgctgatgctgcttctgctgctggcaggttctcattcggtctgggtgccccactcgctgctagaagcgatttgtcaactggaaacacagctcacgccagcctcctgcttagatcaggtgctttggccttcctcttcacagctccctatgctcatggtgctgatgctgctactgcttccctcccatccttctctgctgctgaggctagaagattcgctgctgaccatggactggccgtgagggctgttgcccttcgcgttgctgatgccgaggacgccttcagagcttctgttgctgctggagctaggcctgctttcgagcccgttgagttgggactcggtttcagattggccgaggtggagctctacggcgatgtggttctgcgctacgtgtcctaccctgatgacgctgacgcctctttccttccaggtttcgtgggcgttactagccctggcgccgctgattacggactgagaaggttcgaccacattgtgggcaacgttccagagcttgcccctgccgctgcctacttcgctggattcaccggtttccatgagttcgccgagttcactgctgaggatgtgggtacaaccgagtccggcctgaattctatggtgcttgccaacaatgctgagaacgttttgctccccctgaatgagccagtgcacggtacaaagcgcagatcccagattcaaacctacttggatcaccacggcggcccaggcgttcagcatatggctctcgcctccgatgacgtgctgagaactcttagggagatgcaagcccgctctgctatgggtggcttcgagttcatggccccaccagctcctgagtactacgatggagtgaggcgcagagccggtgacgttcttacagaggctcagatcaaggagtgccaagagttgggtgtgctcgttgatagagatgaccagggcgttctgcttcaaattttcactaagcctgtgggcgaccgccccacactgttccttgagattatccagagaatcggctgcatggagaaggatgagaagggacaggagtaccaaaagggaggttgcggcggattcggcaagggaaatttctcccaattgttcaagtctatcgaggactacgagaagtctcttgaggctaagcaggctgctgctgctcaaggatcatga

SEQ ID NO: 66 - protein, 440 aa, Artificial Sequence
  SbHPPDm-F372A Amino Acid Sequence
MPPTPTTAAATGAAVAAASAEQAAFRLVGHRNFVRVNPRSDRFHTLAFHHVELWCADAASAAGRFSFGLGAPLAARSDLSTGNTAHASLLLRSGALAFLFTAPYAHGADAATASLPSFSAAEARRFAADHGLAVRAVALRVADAEDAFRASVAAGARPAFEPVELGLGFRLAEVELYGDVVLRYVSYPDDADASFLPGFVGVTSPGAADYGLRRFDHIVGNVPELAPAAAYFAGFTGFHEFAEFTAEDVGTTESGLNSMVLANNAENVLLPLNEPVHGTKRRSQIQTYLDHHGGPGVQHMALASDDVLRTLREMQARSAMGGFEFMAPPAPEYYDGVRRRAGDVLTEAQIKECQELGVLVDRDDQGVLLQIATKPVGDRPTLFLEIIQRIGCMEKDEKGQEYQKGGCGGFGKGNFSQLFKSIEDYEKSLEAKQAAAAQGS

SEQ ID NO: 67 - DNA, 1323 bp, Artificial Sequence
  SbHPPDm-F372A-01 Nucleotide Sequence
atgcccccgacccccaccacagccgccgcaaccggcgccgccgtggcggcggcatcagcggagcaggcggcgttccgcctcgtgggccaccgcaacttcgtccgcgtgaacccgcgctccgaccgcttccacacgctcgcgttccaccacgtggagctctggtgcgccgacgcggcctccgccgcgggccgcttctccttcgggctcggcgcgccgctcgccgcgcggtccgacctctccacggggaacaccgcgcacgcgtccctgctgctccgctcgggcgccctcgcgttcctcttcacggcgccctacgcgcacggcgccgacgccgccacggcctcgctgccctccttctccgccgccgaggcgcggcgcttcgcggccgaccacggcctcgcggtgcgcgccgtcgcgctccgcgtggccgacgcggaggacgccttccgcgccagcgtcgcggccggcgcgcgcccggcgttcgagcccgtcgagctcggcctcggcttccgcctcgccgaagtcgagctctacggcgacgtcgtgctccggtacgtgagctacccggacgacgcggacgcgtccttcctgccggggttcgtgggcgtgaccagccccggcgcggcggactacgggctgaggaggttcgaccacatcgtcggcaacgtgccggagctggcgccggcggccgcctacttcgctggcttcacggggttccacgagttcgccgagttcacggcggaggacgtgggcaccacggagagcgggctcaactcgatggtgctcgccaacaacgcggagaacgtgctgctcccactcaacgagccggtgcacggcaccaagcgccgcagccagatacagacgtacttggaccaccacggcggccccggcgtgcagcacatggcgctggccagcgacgacgtgctcaggacgctgagggagatgcaagcgcgctcggccatgggcggcttcgagttcatggcgcctccggcgcccgaatactatgacggcgtgaggcggcgcgccggggacgtgctcacggaggcacagattaaggagtgtcaggaactaggggtgctggtggacagagatgaccagggcgtgctgctccagatcgctaccaagccagtgggggacaggccaacgttgttcttggagatcattcaaaggatcgggtgcatggagaaggatgagaaggggcaagaataccagaagggtggctgtggcgggtttggcaagggaaacttctcccagctgttcaaatccattgaggattatgagaagtcccttgaagctaagcaagctgcagcagctcagggatcctag

SEQ ID NO: 68 - DNA, 1323 bp, Artificial Sequence
  SbHPPDm-F372A-02 Nucleotide Sequence
atgccacctactccaaccactgctgctgctactggtgctgctgtggctgcagcttctgctgagcaggctgctttccgcctggttggacaccgcaacttcgtgagagttaatcccagatcagatcgcttccataccttggccttccaccatgtggagctttggtgcgctgatgctgcttctgctgctggcaggttctcattcggtctgggtgccccactcgctgctagaagcgatttgtcaactggaaacacagctcacgccagcctcctgcttagatcaggtgctttggccttcctcttcacagctccctatgctcatggtgctgatgctgctactgcttccctcccatccttctctgctgctgaggctagaagattcgctgctgaccatggactggccgtgagggctgttgcccttcgcgttgctgatgccgaggacgccttcagagcttctgttgctgctggagctaggcctgctttcgagcccgttgagttgggactcggtttcagattggccgaggtggagctctacggcgatgtggttctgcgctacgtgtcctaccctgatgacgctgacgcctctttccttccaggtttcgtgggcgttactagccctggcgccgctgattacggactgagaaggttcgaccacattgtgggcaacgttccagagcttgcccctgccgctgcctacttcgctggattcaccggtttccatgagttcgccgagttcactgctgaggatgtgggtacaaccgagtccggcctgaattctatggtgcttgccaacaatgctgagaacgttttgctccccctgaatgagccagtgcacggtacaaagcgcagatcccagattcaaacctacttggatcaccacggcggcccaggcgttcagcatatggctctcgcctccgatgacgtgctgagaactcttagggagatgcaagcccgctctgctatgggtggcttcgagttcatggccccaccagctcctgagtactacgatggagtgaggcgcagagccggtgacgttcttacagaggctcagatcaaggagtgccaagagttgggtgtgctcgttgatagagatgaccagggcgttctgcttcaaattgctactaagcctgtgggcgaccgccccacactgttccttgagattatccagagaatcggctgcatggagaaggatgagaagggacaggagtaccaaaagggaggttgcggcggattcggcaagggaaatttctcccaattgttcaagtctatcgaggactacgagaagtctcttgaggctaagcaggctgctgctgctcaaggatcatga

SEQ ID NO: 69 - protein, 446 aa, Oryza sativa
  OsHPPD Amino Acid Sequence
MPPTPTPTATTGAVSAAAAAGENAGFRLVGHRRFVRANPRSDRFQALAFHHVELWCADAASAAGRFAFALGAPLAARSDLSTGNSAHASLLLRSASVAFLFTAPYGGDHGVGADAATTASIPSFSPGAARRFAADHGLAVHAVALRVADAADAFRASVAAGARPAFQPADLGGGFGLAEVELYGDVVLRFVSHPDGADAPFLPGFEGVSNPGAVDYGLRRFDHVVGNVPELAPVAAYISGFTGFHEFAEFTAEDVGTAESGLNSVVLANNAETVLLPLNEPVHGTKRRSQIQTYLDHHGGPGVQHIALASDDVLGTLREMRARSAMGGFEFLAPPPPNYYDGVRRRAGDVLSEEQINECQELGVLVDRDDQGVLLQIFTKPVGDRPTFFLEMIQRIGCMEKDESGQEYQKGGCGGFGKGNFSELFKSIEEYEKSLEAKQAPTVQGS

SEQ ID NO: 70 - DNA, 1341 bp, Oryza sativa
  OsHPPD-01 Nucleotide Sequence
atgcctcccactcccacccccaccgccaccaccggcgccgtctcggccgctgcggcggcgggggagaacgcggggttccgcctcgtcgggcaccgccgcttcgtccgcgccaacccgcggagcgaccggttccaggcgctcgcgttccaccacgtcgagctctggtgcgccgacgccgcgtccgccgcgggccggttcgccttcgccctgggcgcgccgctcgccgccaggtccgacctctccacggggaactccgcgcacgcctccctcctcctccgctccgcctccgtcgcgttcctcttcaccgccccctacggcggcgaccacggcgtcggcgcggacgcggccaccaccgcctccatcccttccttctccccaggcgccgcgcggaggttcgccgcggaccacggcctcgcggtgcacgccgtggcgctgcgcgtcgccgacgcggccgacgccttccgcgccagcgtcgcggccggtgcgcgcccggcgttccagcccgccgacctcggcggtggcttcggcctcgcggaggtggagctctacggcgacgtcgtgctccgcttcgtcagccacccggacggcgccgacgcgcccttcctcccgggtttcgagggcgtcagcaacccgggcgccgtggactacggcctccgccggttcgaccacgtcgtcggcaacgtgccggagctcgctccggtagccgcgtacatctccgggttcaccgggttccacgagttcgccgagttcaccgccgaggacgtgggcaccgccgagagcggcctcaactcggtggtgctcgccaacaacgcggagaccgtgctgctgccgctcaacgagccggtgcacggcaccaagcggcggagccagatacagacgtacctggaccaccacggcggcccgggggtgcagcacatcgcgctggccagcgacgacgtgctcgggacgctgagggagatgcgggcgcgctccgccatgggcggcttcgagttcttggcgccgccgccgcccaactactacgacggcgtgcggcggcgcgccggggacgtgctctcggaggagcagatcaacgagtgccaggagctcggggtgctcgtggacagggatgaccagggggtgttgctccagatcttcaccaagccagtaggagacaggccaacctttttcttggagatgatacaaaggattgggtgcatggagaaggatgagagtgggcaggagtaccagaagggcggctgcggcgggtttgggaagggcaacttctcggagctgttcaagtccattgaggagtatgagaaatcccttgaagccaagcaagcccctacagttcaaggatcctag

SEQ ID NO: 71 - DNA, 1341 bp, Artificial Sequence
  OsHPPD-02 Nucleotide Sequence
atgccacctactccaacacctaccgctaccactggagccgtgagcgctgctgctgctgctggagagaacgctggattcagactcgtgggccacaggcgcttcgttagggccaatccacgcagcgatagattccaggctctggccttccaccatgttgagctttggtgcgctgacgctgcctcagctgccggcaggttcgctttcgctttgggtgcccctctcgctgctagatccgatttgtctactggcaacagcgctcacgcctcactcctgcttaggtccgcttctgtggccttcctcttcacagccccctacggcggagatcatggagttggtgctgacgctgccacaaccgcctccattcctagcttctcacccggagctgccagaaggttcgctgccgaccacggtttggctgtgcatgctgttgccctcagagtggccgatgctgccgacgctttcagggcttcagtggctgctggtgctagaccagctttccaacctgctgatctgggtggcggattcggactggccgaggtggagctttacggtgacgtggttttgaggttcgtttcccatcccgatggagctgacgcccccttcctcccaggtttcgagggcgtgtctaacccaggtgctgttgattacggcttgcgcagattcgaccacgtggttggtaatgtgcccgagctcgccccagttgctgcctacatcagcggattcaccggtttccatgagttcgctgagttcactgccgaggatgtgggaacagccgagtccggtttgaactctgtggttctcgctaacaatgccgagactgtgttgctccctcttaatgagcccgttcacggcaccaagaggcgctcacagattcaaacttacctggatcaccacggcggcccaggtgtgcagcatatcgctcttgccagcgatgacgttttgggaacactccgcgagatgagagctagatcagccatgggaggtttcgagttcctggctcccccacctcccaactactacgatggcgtgagaaggcgcgccggagacgttctttccgaggagcagattaatgagtgccaagagctgggtgtgcttgttgatagggatgaccagggcgtgctgcttcaaatcttcacaaagccagttggagaccgccctaccttcttcctcgagatgattcaaagaatcggctgcatggagaaggatgagtctggacaggagtaccaaaagggcggatgcggtggcttcggcaagggaaatttcagcgagctgttcaagtcaattgaggagtacgagaagtcccttgaggctaagcaggcccctaccgtgcaaggctcttga

SEQ ID NO: 72 - protein, 446 aa, Artificial Sequence
  OsHPPDm-F372A Amino Acid Sequence
MPPTPTPTATTGAVSAAAAAGENAGFRLVGHRRFVRANPRSDRFQALAFHHVELWCADAASAAGRFAFALGAPLAARSDLSTGNSAHASLLLRSASVAFLFTAPYGGDHGVGADAATTASIPSFSPGAARRFAADHGLAVHAVALRVADAADAFRASVAAGARPAFQPADLGGGFGLAEVELYGDVVLRFVSHPDGADAPFLPGFEGVSNPGAVDYGLRRFDHVVGNVPELAPVAAYISGFTGFHEFAEFTAEDVGTAESGLNSVVLANNAETVLLPLNEPVHGTKRRSQIQTYLDHHGGPGVQHIALASDDVLGTLREMRARSAMGGFEFLAPPPPNYYDGVRRRAGDVLSEEQINECQELGVLVDRDDQGVLLQIATKPVGDRPTFFLEMIQRIGCMEKDESGQEYQKGGCGGFGKGNFSELFKSIEEYEKSLEAKQAPTVQGS

SEQ ID NO: 73 - DNA, 1341 bp, Artificial Sequence
  OsHPPDm-F372A-01 Nucleotide Sequence
atgcctcccactcccacccccaccgccaccaccggcgccgtctcggccgctgcggcggcgggggagaacgcggggttccgcctcgtcgggcaccgccgcttcgtccgcgccaacccgcggagcgaccggttccaggcgctcgcgttccaccacgtcgagctctggtgcgccgacgccgcgtccgccgcgggccggttcgccttcgccctgggcgcgccgctcgccgccaggtccgacctctccacggggaactccgcgcacgcctccctcctcctccgctccgcctccgtcgcgttcctcttcaccgccccctacggcggcgaccacggcgtcggcgcggacgcggccaccaccgcctccatcccttccttctccccaggcgccgcgcggaggttcgccgcggaccacggcctcgcggtgcacgccgtggcgctgcgcgtcgccgacgcggccgacgccttccgcgccagcgtcgcggccggtgcgcgcccggcgttccagcccgccgacctcggcggtggcttcggcctcgcggaggtggagctctacggcgacgtcgtgctccgcttcgtcagccacccggacggcgccgacgcgcccttcctcccgggtttcgagggcgtcagcaacccgggcgccgtggactacggcctccgccggttcgaccacgtcgtcggcaacgtgccggagctcgctccggtagccgcgtacatctccgggttcaccgggttccacgagttcgccgagttcaccgccgaggacgtgggcaccgccgagagcggcctcaactcggtggtgctcgccaacaacgcggagaccgtgctgctgccgctcaacgagccggtgcacggcaccaagcggcggagccagatacagacgtacctggaccaccacggcggcccgggggtgcagcacatcgcgctggccagcgacgacgtgctcgggacgctgagggagatgcgggcgcgctccgccatgggcggcttcgagttcttggcgccgccgccgcccaactactacgacggcgtgcggcggcgcgccggggacgtgctctcggaggagcagatcaacgagtgccaggagctcggggtgctcgtggacagggatgaccagggggtgttgctccagatcgctaccaagccagtaggagacaggccaacctttttcttggagatgatacaaaggattgggtgcatggagaaggatgagagtgggcaggagtaccagaagggcggctgcggcgggtttgggaagggcaacttctcggagctgttcaagtccattgaggagtatgagaaatcccttgaagccaagcaagcccctacagttcaaggatcctag

SEQ ID NO: 74 - DNA, 1341 bp, Artificial Sequence
  OsHPPDm-F372A-02 Nucleotide Sequence
atgccacctactccaacacctaccgctaccactggagccgtgagcgctgctgctgctgctggagagaacgctggattcagactcgtgggccacaggcgcttcgttagggccaatccacgcagcgatagattccaggctctggccttccaccatgttgagctttggtgcgctgacgctgcctcagctgccggcaggttcgctttcgctttgggtgcccctctcgctgctagatccgatttgtctactggcaacagcgctcacgcctcactcctgcttaggtccgcttctgtggccttcctcttcacagccccctacggcggagatcatggagttggtgctgacgctgccacaaccgcctccattcctagcttctcacccggagctgccagaaggttcgctgccgaccacggtttggctgtgcatgctgttgccctcagagtggccgatgctgccgacgctttcagggcttcagtggctgctggtgctagaccagctttccaacctgctgatctgggtggcggattcggactggccgaggtggagctttacggtgacgtggttttgaggttcgtttcccatcccgatggagctgacgcccccttcctcccaggtttcgagggcgtgtctaacccaggtgctgttgattacggcttgcgcagattcgaccacgtggttggtaatgtgcccgagctcgccccagttgctgcctacatcagcggattcaccggtttccatgagttcgctgagttcactgccgaggatgtgggaacagccgagtccggtttgaactctgtggttctcgctaacaatgccgagactgtgttgctccctcttaatgagcccgttcacggcaccaagaggcgctcacagattcaaacttacctggatcaccacggcggcccaggtgtgcagcatatcgctcttgccagcgatgacgttttgggaacactccgcgagatgagagctagatcagccatgggaggtttcgagttcctggctcccccacctcccaactactacgatggcgtgagaaggcgcgccggagacgttctttccgaggagcagattaatgagtgccaagagctgggtgtgcttgttgatagggatgaccagggcgtgctgcttcaaatcgctacaaagccagttggagaccgccctaccttcttcctcgagatgattcaaagaatcggctgcatggagaaggatgagtctggacaggagtaccaaaagggcggatgcggtggcttcggcaagggaaatttcagcgagctgttcaagtcaattgaggagtacgagaagtcccttgaggctaagcaggcccctaccgtgcaaggctcttga

SEQ ID NO: 75 - protein, 488 aa, Glycine max
  GmHPPD Amino Acid Sequence
MPMYTPSLSAPSSNHIQPSVTLPLYITTTKLNLKQQHHTTPMPIPMCNEIQAQAQAQAQPGFKLVGFKNFVRTNPKSDRFQVNRFHHIEFWCTDATNASRRFSWGLGMPIVAKSDLSTGNQIHASYLLRSGDLSFLFSAPYSPSLSAGSSAASSASIPSFDAATCLAFAAKHGFGVRAIALEVADAEAAFSASVAKGAEPASPPVLVDDRTGFAEVRLYGDVVLRYVSYKDAAPQAPHADPSRWFLPGFEAAASSSSFPELDYGIRRLDHAVGNVPELAPAVRYLKGFSGFHEFAEFTAEDVGTSESGLNSVVLANNSETVLLPLNEPVYGTKRKSQIETYLEHNEGAGVQHLALVTHDIFTTLREMRKRSFLGGFEFMPSPPPTYYANLHNRAADVLTVDQIKQCEELGILVDRDDQGTLLQIFTKPVGDRPTIFIEIIQRIGCMVEDEEGKVYQKGACGGFGKGNFSELFKSIEEYEKTLEAKRTA

SEQ ID NO: 76 - DNA, 1467 bp, Glycine max
  GmHPPD-01 Nucleotide Sequence
atgcccatgtacactccatcactctccgcaccctcctccaatcacattcaaccaagtgtcacactccccttatatatcacaaccaccaagctcaatctcaagcagcagcatcacaccacaccaatgccaatacccatgtgcaacgaaattcaagcccaagcccaagcccaagcccaacctgggtttaagctcgtcggtttcaaaaacttcgtccgaaccaatcctaagtcggaccgctttcaagtcaaccgcttccaccacatcgagttctggtgcaccgatgccaccaacgcctctcgccgattctcttggggacttggaatgcctattgtggcaaaatctgatctctccaccggaaaccaaatccacgcctcctacctcctccgctccggcgacctctccttcctcttctccgctccttactctccctctctctccgccggctcctccgctgcctcctccgcctccattcccagtttcgacgccgccacctgccttgccttcgctgccaaacacggcttcggcgtccgcgccatcgccttggaagtcgccgacgcggaagccgctttcagcgccagcgtcgcgaaaggagccgagccggcgtcgccgccggttctcgtcgacgatcgcaccggcttcgcggaggtgcgcctctacggcgacgtggtgctccgctacgtcagctacaaggacgccgcgccgcaggcgccacacgcagatccgtcgcggtggttcctgccgggattcgaggccgcggcgtcgtcgtcttcgtttccggagctggactacgggatccggcggctggaccacgccgtcgggaacgttccggagctggcgccggcggtgaggtacctgaaaggcttcagcggattccacgagttcgcggagttcaccgcggaggacgtgggaacgagcgagagcgggttgaactcggtggttctggcgaacaactcggagacggtgttgctgccgctgaacgagccggtttacggaacgaagaggaagagccagattgagacgtatttggaacacaacgaaggtgctggtgtgcagcaccttgcgcttgttactcacgacatcttcaccacactgagagagatgagaaagcgaagtttccttggtggatttgagttcatgccttctcctcctcccacctattacgccaacctccacaaccgtgccgctgatgtgttgaccgttgaccagattaagcagtgtgaggagcttgggattcttgttgacagagatgatcagggcactctgcttcagattttcacyaagcctgttggggacaggccaacgatattcatagagataattcagaggatcgggtgcatggtggaggatgaggaagggaaggtgtaccagaagggtgcatgtgggggttttgggaaaggcaatttttctgagcttttcaaatccattgaagaatatgagaagactttggaagctaaaagaaccgcgtaa

SEQ ID NO: 77 - DNA, 1467 bp, Artificial Sequence
  GmHPPD-02 Nucleotide Sequence
atgcctatgtatactccttctttgtctgctccttcttctaatcatattcaaccttctgttactttgcctttgtatattactactactaagttgaatttgaagcaacaacatcatactactcctatgcctattcctatgtgtaatgaaattcaagctcaagctcaagctcaagctcaacctggatttaagttggttggatttaagaattttgttagaactaatcctaagtctgatagatttcaagttaatagatttcatcatattgaattttggtgtactgatgctactaatgcttctagaagattttcttggggattgggaatgcctattgttgctaagtctgatttgtctactggaaatcaaattcatgcttcttatttgttgagatctggagatttgtcttttttgttttctgctccttattctccttctttgtctgctggatcttctgctgcttcttctgcttctattccttcttttgatgctgctacttgtttggcttttgctgctaagcatggatttggagttagagctattgctttggaagttgctgatgctgaagctgctttttctgcttctgttgctaagggagctgaacctgcttctcctcctgttttggttgatgatagaactggatttgctgaagttagattgtatggagatgttgttttgagatatgtttcttataaggatgctgctcctcaagctcctcatgctgatccttctagatggtttttgcctggatttgaagctgctgcttcttcttcttcttttcctgaattggattatggaattagaagattggatcatgctgttggaaatgttcctgaattggctcctgctgttagatatttgaagggattttctggatttcatgaatttgctgaatttactgctgaagatgttggaacttctgaatctggattgaattctgttgttttggctaataattctgaaactgttttgttgcctttgaatgaacctgtttatggaactaagagaaagtctcaaattgaaacttatttggaacataatgaaggagctggagttcaacatttggctttggttactcatgatatttttactactttgagagaaatgagaaagagatcttttttgggaggatttgaatttatgccttctcctcctcctacttattatgctaatttgcataatagagctgctgatgttttgactgttgatcaaattaagcaatgtgaagaattgggaattttggttgatagagatgatcaaggaactttgttgcaaatttttactaagcctgttggagatagacctactatttttattgaaattattcaaagaattggatgtatggttgaagatgaagaaggaaaggtttatcaaaagggagcttgtggaggatttggaaagggaaatttttctgaattgtttaagtctattgaagaatatgaaaagactttggaagctaagagaactgcttga

SEQ ID NO: 78 - protein, 488 aa, Artificial Sequence
  GmHPPDm-F372A Amino Acid Sequence
MPMYTPSLSAPSSNHIQPSVTLPLYITTTKLNLKQQHHTTPMPIPMCNEIQAQAQAQAQPGFKLVGFKNFVRTNPKSDRFQVNRFHHIEFWCTDATNASRRFSWGLGMPIVAKSDLSTGNQIHASYLLRSGDLSFLFSAPYSPSLSAGSSAASSASIPSFDAATCLAFAAKHGFGVRAIALEVADAEAAFSASVAKGAEPASPPVLVDDRTGFAEVRLYGDVVLRYVSYKDAAPQAPHADPSRWFLPGFEAAASSSSFPELDYGIRRLDHAVGNVPELAPAVRYLKGFSGFHEFAEFTAEDVGTSESGLNSVVLANNSETVLLPLNEPVYGTKRKSQIETYLEHNEGAGVQHLALVTHDIFTTLREMRKRSFLGGFEFMPSPPPTYYANLHNRAADVLTVDQIKQCEELGILVDRDDQGTLLQIATKPVGDRPTIFIEIIQRIGCMVEDEEGKVYQKGACGGFGKGNFSELFKSIEEYEKTLEAKRTA

SEQ ID NO: 79 - DNA, 1467 bp, Artificial Sequence
  GmHPPDm-F372A-01 Nucleotide Sequence
atgcccatgtacactccatcactctccgcaccctcctccaatcacattcaaccaagtgtcacactccccttatatatcacaaccaccaagctcaatctcaagcagcagcatcacaccacaccaatgccaatacccatgtgcaacgaaattcaagcccaagcccaagcccaagcccaacctgggtttaagctcgtcggtttcaaaaacttcgtccgaaccaatcctaagtcggaccgctttcaagtcaaccgcttccaccacatcgagttctggtgcaccgatgccaccaacgcctctcgccgattctcttggggacttggaatgcctattgtggcaaaatctgatctctccaccggaaaccaaatccacgcctcctacctcctccgctccggcgacctctccttcctcttctccgctccttactctccctctctctccgccggctcctccgctgcctcctccgcctccattcccagtttcgacgccgccacctgccttgccttcgctgccaaacacggcttcggcgtccgcgccatcgccttggaagtcgccgacgcggaagccgctttcagcgccagcgtcgcgaaaggagccgagccggcgtcgccgccggttctcgtcgacgatcgcaccggcttcgcggaggtgcgcctctacggcgacgtggtgctccgctacgtcagctacaaggacgccgcgccgcaggcgccacacgcagatccgtcgcggtggttcctgccgggattcgaggccgcggcgtcgtcgtcttcgtttccggagctggactacgggatccggcggctggaccacgccgtcgggaacgttccggagctggcgccggcggtgaggtacctgaaaggcttcagcggattccacgagttcgcggagttcaccgcggaggacgtgggaacgagcgagagcgggttgaactcggtggttctggcgaacaactcggagacggtgttgctgccgctgaacgagccggtttacggaacgaagaggaagagccagattgagacgtatttggaacacaacgaaggtgctggtgtgcagcaccttgcgcttgttactcacgacatcttcaccacactgagagagatgagaaagcgaagtttccttggtggatttgagttcatgccttctcctcctcccacctattacgccaacctccacaaccgtgccgctgatgtgttgaccgttgaccagattaagcagtgtgaggagcttgggattcttgttgacagagatgatcagggcactctgcttcagattgctacyaagcctgttggggacaggccaacgatattcatagagataattcagaggatcgggtgcatggtggaggatgaggaagggaaggtgtaccagaagggtgcatgtgggggttttgggaaaggcaatttttctgagcttttcaaatccattgaagaatatgagaagactttggaagctaaaagaaccgcgtaa

SEQ ID NO: 80 - DNA, 1467 bp, Artificial Sequence
  GmHPPDm-F372A-02 Nucleotide Sequence
atgcctatgtatactccttctttgtctgctccttcttctaatcatattcaaccttctgttactttgcctttgtatattactactactaagttgaatttgaagcaacaacatcatactactcctatgcctattcctatgtgtaatgaaattcaagctcaagctcaagctcaagctcaacctggatttaagttggttggatttaagaattttgttagaactaatcctaagtctgatagatttcaagttaatagatttcatcatattgaattttggtgtactgatgctactaatgcttctagaagattttcttggggattgggaatgcctattgttgctaagtctgatttgtctactggaaatcaaattcatgcttcttatttgttgagatctggagatttgtcttttttgttttctgctccttattctccttctttgtctgctggatcttctgctgcttcttctgcttctattccttcttttgatgctgctacttgtttggcttttgctgctaagcatggatttggagttagagctattgctttggaagttgctgatgctgaagctgctttttctgcttctgttgctaagggagctgaacctgcttctcctcctgttttggttgatgatagaactggatttgctgaagttagattgtatggagatgttgttttgagatatgtttcttataaggatgctgctcctcaagctcctcatgctgatccttctagatggtttttgcctggatttgaagctgctgcttcttcttcttcttttcctgaattggattatggaattagaagattggatcatgctgttggaaatgttcctgaattggctcctgctgttagatatttgaagggattttctggatttcatgaatttgctgaatttactgctgaagatgttggaacttctgaatctggattgaattctgttgttttggctaataattctgaaactgttttgttgcctttgaatgaacctgtttatggaactaagagaaagtctcaaattgaaacttatttggaacataatgaaggagctggagttcaacatttggctttggttactcatgatatttttactactttgagagaaatgagaaagagatcttttttgggaggatttgaatttatgccttctcctcctcctacttattatgctaatttgcataatagagctgctgatgttttgactgttgatcaaattaagcaatgtgaagaattgggaattttggttgatagagatgatcaaggaactttgttgcaaattgctactaagcctgttggagatagacctactatttttattgaaattattcaaagaattggatgtatggttgaagatgaagaaggaaaggtttatcaaaagggagcttgtggaggatttggaaagggaaatttttctgaattgtttaagtctattgaagaatatgaaaagactttggaagctaagagaactgcttga

SEQ ID NO: 81 - protein, 434 aa, Cicer arietinum
  CaHPPD Amino Acid Sequence
MGTIETQTGFKLVGFNNFVRTNPKSDRFKVKRFHHVEFWCPDATNTARRFSWGLGMPIVAKSDLSTGNQTHASYLLRSGDLNFLFTAAYSPSISLSAPHPTASIPSFSAPTSFAFSASHGLGVRAVAIEVDDAEFAYTTSVNHGAIPSSPPVVLDNRVKLAEVQLYGDVVLRYVSYNDPIETSNPNPNHWFLPGFEPVEETSSNQSIDFGIQRLDHAVGNVPELSSALNYVKQFTGFHEFAEFTAEDVGTSESGLNSTVLANNEETVLLPMNEPVYGTKRKSQIQTYLEHNEGAGLQHLALMSNDIFKTLREMRKRSGIGGFEFMPSPPPTYYSNLKKRVGDVLNDEQIKECEELGILVDKDDQGTLLQIFTKPVGDRPTIFIEIIQRVGCMLKDDEGKEYQKGGCGGFGKGNFSELFKSIEEYEKTLEIKRTA

SEQ ID NO: 82 - DNA, 1305 bp, Cicer arietinum
  CaHPPD-01 Nucleotide Sequence
atgggcaccatagaaacccaaaccgggtttaaattagttgggttcaacaacttcgtccgaaccaacccaaaatcagaccggttcaaagtgaaacgtttccaccacgtcgaattttggtgccccgacgcaaccaacaccgcacgccgcttctcatggggactcggaatgcctatcgtagctaaatccgacctctctaccggaaatcaaactcacgcttcctatctcctccgctccggcgacctcaatttcctcttcaccgccgcttattccccatcaatttctctttctgctcctcatccaaccgcctcaattccatctttctccgcacccacctccttcgccttctccgcctcccacggccttggcgtccgcgctgtcgcaatcgaagtcgacgacgccgaattcgcctacacaacaagcgtaaaccacggcgcgatcccgtcgtctcctcccgtcgtcctcgacaaccgcgtcaaactcgctgaagttcaactctacggcgacgtcgttttgcgttatgtcagttacaacgatccgatcgaaacctcaaaccctaaccctaaccactggttcctccctggcttcgaaccagtagaagaaacatcctctaaccaatcaatcgacttcggaatccaacgactagaccacgccgtcggaaacgtaccggaactttcatcagcactgaattacgtgaaacaattcactggttttcacgaattcgccgaattcacagcggaagacgttggaacgagtgagagtgggttgaactcaacagtactagcgaacaatgaagaaacggttttgcttccgatgaacgaaccggtttacggtaccaaaagaaagagtcagatacaaacttatttggaacacaacgaaggtgctgggttacagcatttagcattgatgtcaaatgatatattcaagacattgagagagatgaggaagagaagtggtattggtggatttgagtttatgccttcaccaccaccaacttattatagtaatttgaagaaacgtgttggtgatgttttgaatgatgaacagattaaggagtgtgaggagcttgggattctggttgataaagatgatcagggtactctgcttcagattttcactaagcctgttggagataggccaaccatatttatagagataattcagagagttggatgcatgctcaaggatgatgaagggaaggagtaccaaaagggagggtgtggaggctttggtaaaggaaacttctcagagcttttcaaatccattgaagaatatgagaagactttggaaataaaaagaaccgcatga

SEQ ID NO: 83 - DNA, 1305 bp, Artificial Sequence
  CaHPPD-02 Nucleotide Sequence
atgggcacaattgagacacagaccggtttcaagctcgtgggcttcaacaatttcgttcgcaccaatcctaagtccgatcgcttcaaggtgaagagattccaccatgttgagttctggtgccccgacgccactaacacagctaggcgcttctcttggggccttggaatgccaatcgttgccaagtccgatttgtctaccggcaatcaaactcacgctagctacctcctgagatcaggagacctcaacttcctgttcaccgccgcttacagcccatcaatttccctttctgccccacacccaaccgctagcatccctagcttctcagcccccacttcattcgccttctccgcttctcatggtttgggcgtgcgcgccgttgctattgaggttgatgacgccgagttcgcttacaccactagcgtgaatcacggtgccatcccttcctctccacctgtggttcttgataacagagtgaagcttgctgaggttcagttgtacggcgatgtggttttgcgctacgtgtcctacaatgaccccattgagacttctaaccctaatcccaaccattggttcctcccaggcttcgagcctgtggaggagacaagctcaaaccagtccattgatttcggtatccaaagactggaccacgccgtgggcaatgttcctgagctctcctctgctctgaactacgttaagcaattcacaggcttccatgagttcgccgagttcacagctgaggatgtgggaaccagcgagtcaggtctcaatagcacagtgctggctaacaatgaggagaccgttcttttgcccatgaacgagccagtgtacggaactaagaggaagtcacagattcaaacataccttgagcacaatgagggagccggtttgcagcatcttgctttgatgtccaacgacattttcaagacccttcgcgagatgagaaagaggtctggaatcggcggattcgagttcatgccatccccaccaccaacttactactcaaatctcaagaagagagtgggcgatgttctgaacgacgagcaaattaaggagtgcgaggagcttggaatcttggtggataaggatgaccagggtactctcctgcaaatcttcacaaagccagttggcgacaggcctactattttcatcgagattatccagcgcgtgggctgcatgctgaaggatgacgagggaaaggagtaccaaaagggtggctgcggaggtttcggcaagggaaacttctccgagctcttcaagtctattgaggagtacgagaagaccctggagatcaagaggactgcctga

SEQ ID NO: 84 - protein, 434 aa, Artificial Sequence
  CaHPPDm-F372A Amino Acid Sequence
MGTIETQTGFKLVGFNNFVRTNPKSDRFKVKRFHHVEFWCPDATNTARRFSWGLGMPIVAKSDLSTGNQTHASYLLRSGDLNFLFTAAYSPSISLSAPHPTASIPSFSAPTSFAFSASHGLGVRAVAIEVDDAEFAYTTSVNHGAIPSSPPVVLDNRVKLAEVQLYGDVVLRYVSYNDPIETSNPNPNHWFLPGFEPVEETSSNQSIDFGIQRLDHAVGNVPELSSALNYVKQFTGFHEFAEFTAEDVGTSESGLNSTVLANNEETVLLPMNEPVYGTKRKSQIQTYLEHNEGAGLQHLALMSNDIFKTLREMRKRSGIGGFEFMPSPPPTYYSNLKKRVGDVLNDEQIKECEELGILVDKDDQGTLLQIATKPVGDRPTIFIEIIQRVGCMLKDDEGKEYQKGGCGGFGKGNFSELFKSIEEYEKTLEIKRTA

SEQ ID NO: 85 - DNA, 1305 bp, Artificial Sequence
  CaHPPDm-F372A-01 Nucleotide Sequence
atgggcaccatagaaacccaaaccgggtttaaattagttgggttcaacaacttcgtccgaaccaacccaaaatcagaccggttcaaagtgaaacgtttccaccacgtcgaattttggtgccccgacgcaaccaacaccgcacgccgcttctcatggggactcggaatgcctatcgtagctaaatccgacctctctaccggaaatcaaactcacgcttcctatctcctccgctccggcgacctcaatttcctcttcaccgccgcttattccccatcaatttctctttctgctcctcatccaaccgcctcaattccatctttctccgcacccacctccttcgccttctccgcctcccacggccttggcgtccgcgctgtcgcaatcgaagtcgacgacgccgaattcgcctacacaacaagcgtaaaccacggcgcgatcccgtcgtctcctcccgtcgtcctcgacaaccgcgtcaaactcgctgaagttcaactctacggcgacgtcgttttgcgttatgtcagttacaacgatccgatcgaaacctcaaaccctaaccctaaccactggttcctccctggcttcgaaccagtagaagaaacatcctctaaccaatcaatcgacttcggaatccaacgactagaccacgccgtcggaaacgtaccggaactttcatcagcactgaattacgtgaaacaattcactggttttcacgaattcgccgaattcacagcggaagacgttggaacgagtgagagtgggttgaactcaacagtactagcgaacaatgaagaaacggttttgcttccgatgaacgaaccggtttacggtaccaaaagaaagagtcagatacaaacttatttggaacacaacgaaggtgctgggttacagcatttagcattgatgtcaaatgatatattcaagacattgagagagatgaggaagagaagtggtattggtggatttgagtttatgccttcaccaccaccaacttattatagtaatttgaagaaacgtgttggtgatgttttgaatgatgaacagattaaggagtgtgaggagcttgggattctggttgataaagatgatcagggtactctgcttcagattgctactaagcctgttggagataggccaaccatatttatagagataattcagagagttggatgcatgctcaaggatgatgaagggaaggagtaccaaaagggagggtgtggaggctttggtaaaggaaacttctcagagcttttcaaatccattgaagaatatgagaagactttggaaataaaaagaaccgcatga

SEQ ID NO: 86 - DNA, 1305 bp, Artificial Sequence
  CaHPPDm-F372A-02 Nucleotide Sequence
atgggcacaattgagacacagaccggtttcaagctcgtgggcttcaacaatttcgttcgcaccaatcctaagtccgatcgcttcaaggtgaagagattccaccatgttgagttctggtgccccgacgccactaacacagctaggcgcttctcttggggccttggaatgccaatcgttgccaagtccgatttgtctaccggcaatcaaactcacgctagctacctcctgagatcaggagacctcaacttcctgttcaccgccgcttacagcccatcaatttccctttctgccccacacccaaccgctagcatccctagcttctcagcccccacttcattcgccttctccgcttctcatggtttgggcgtgcgcgccgttgctattgaggttgatgacgccgagttcgcttacaccactagcgtgaatcacggtgccatcccttcctctccacctgtggttcttgataacagagtgaagcttgctgaggttcagttgtacggcgatgtggttttgcgctacgtgtcctacaatgaccccattgagacttctaaccctaatcccaaccattggttcctcccaggcttcgagcctgtggaggagacaagctcaaaccagtccattgatttcggtatccaaagactggaccacgccgtgggcaatgttcctgagctctcctctgctctgaactacgttaagcaattcacaggcttccatgagttcgccgagttcacagctgaggatgtgggaaccagcgagtcaggtctcaatagcacagtgctggctaacaatgaggagaccgttcttttgcccatgaacgagccagtgtacggaactaagaggaagtcacagattcaaacataccttgagcacaatgagggagccggtttgcagcatcttgctttgatgtccaacgacattttcaagacccttcgcgagatgagaaagaggtctggaatcggcggattcgagttcatgccatccccaccaccaacttactactcaaatctcaagaagagagtgggcgatgttctgaacgacgagcaaattaaggagtgcgaggagcttggaatcttggtggataaggatgaccagggtactctcctgcaaatcgctacaaagccagttggcgacaggcctactattttcatcgagattatccagcgcgtgggctgcatgctgaaggatgacgagggaaaggagtaccaaaagggtggctgcggaggtttcggcaagggaaacttctccgagctcttcaagtctattgaggagtacgagaagaccctggagatcaagaggactgcctga

SEQ ID NO: 87 - protein, 440 aa, Brassica napus
  BnHPPD Amino Acid Sequence
MGHENAAVCETQQHDDAASPGFKLVGFSKFVRKNPKSDKFKVKRFHHIEFWCGDATNVSRRFSWGLGMRFSAKSDLSTGNMVHASYLLTSGDLRFLFTAPYSPSLSAGEAQPSATASIPSFDHASCRSFFSSHGLGVRAVAIEVEDAESAFSISVANGAVPSSPPNVLNGAVTIAEVKLYGDVVLRYVSYYNGTVSFLPGFESVDDTSSFPLDYGIRRLDHAVGNVPELGPALTYLAGFTGFHQFAEFTADDVGTAESGLNSAVLANNDEMVLLPINEPVHGTKRKSQIQTFLEHNEGAGLQHLALMSEDIFRTLREMRKRSGVGGFDFMPSPPPTYYKNLKKRVGDVLSEEQIEECEELGILVDRDDQGTLLQIFTKPLGDRPTIFIEIIQRVGCMKRDEEGKVYQSGGCGGFGKGNFSELFKSIEEYEKTLEAKQLVG

SEQ ID NO: 88 - DNA, 1323 bp, Brassica napus
  BnHPPD Amino Acid Sequence
atggggcacgaaaacgccgccgtttgcgaaactcagcagcacgacgacgctgcgtcgcctggattcaagctcgtcggattctccaagttcgtgaggaagaatccaaagtccgacaagttcaaggtaaagcgcttccaccacatcgagttctggtgcggggacgccaccaacgtctcccgccgcttctcgtggggactaggcatgcgattctccgccaaatccgatctctccaccggaaacatggttcacgcctcctacctactcacctccggcgacctccgattcctcttcaccgctccctactctccctctctctccgccggcgaagctcaaccgtccgctacagcctcaatcccatcgttcgatcacgcttcttgccgctccttcttctcttcgcacggactcggcgtgagagccgtagcgatcgaagtcgaagacgctgagtcagcattctcaatcagcgtagcaaacggcgccgttccttcctcccctcctaacgtcctcaacggagccgttacgatcgcggaagttaaactatacggagacgtcgtcctccgttacgttagttattataacggaaccgttagtttcctccccggatttgaatctgttgacgatacgtcgtcgtttccgctagattacggtatacgccgtctcgaccacgcggtgggaaacgtccccgagctcggcccagctttaacttacctcgcggggttcaccggcttccaccagttcgcggagttcactgcagacgacgtgggaacagccgagagcggattgaactcggctgtgctagccaacaacgacgagatggttctgttgccgataaacgagccggttcacgggacgaagaggaagagccagatccagacgtttcttgagcacaacgaaggagccgggctgcagcatttggctctgatgagcgaagatatattcaggacgctgagggagatgaggaagaggagcggcgttggagggttcgacttcatgccttctcctccgcctacttattacaagaatctcaagaaaagggttggagatgtgcttagtgaggagcagattgaggagtgtgaggagttggggattcttgtggatagagatgatcaggggacgttgcttcagatctttacgaaaccacttggtgacaggccgacgatatttatagagataatacagagagtgggatgcatgaagagagatgaggaagggaaggtttaccagagtggaggatgtggtgggtttggtaaaggtaacttctctgagctctttaagtctattgaagagtatgagaagacacttgaagccaaacagcttgtgggttga

SEQ ID NO: 89 - DNA, 1323 bp, Artificial Sequence
  BnHPPD-02 Nucleotide Sequence
atgggccacgagaatgccgctgtgtgcgagacccagcaacatgatgacgccgcttctcccggattcaagctcgttggtttcagcaagttcgtgaggaagaacccaaagtctgataagttcaaggtgaagcgcttccaccatattgagttctggtgcggagacgccaccaatgttagcaggcgcttctcatggggccttggaatgcgcttctcagccaagtccgatttgtctactggcaacatggtgcacgctagctacctcctgacatcaggagacctcagattcctgttcaccgctccatacagcccatcactttctgctggagaggctcagccttctgctaccgctagcatcccctcattcgatcacgcttcctgccgctctttcttctcctctcatggtctgggcgtgagagccgttgctattgaggttgaggacgccgagtctgctttctctatcagcgtggccaacggtgctgttcctagctcaccacctaacgtgcttaacggcgccgttactattgctgaggtgaagctttacggcgatgtggttttgcgctacgtgtcctactacaacggcactgtgtcattcttgccaggtttcgagtccgtggatgacacatcctctttccctctcgattacggcatcagaaggctggaccacgccgtgggtaacgttcctgagcttggccccgcccttacctacttggctggtttcactggcttccatcaattcgccgagttcacagctgatgacgttggcaccgctgagtccggacttaactctgccgttttggctaacaatgacgagatggtgcttttgccaattaatgagcctgttcatggcaccaagaggaagagccagatccaaactttccttgagcacaatgagggagccggtttgcagcatcttgctttgatgtcagaggatattttcaggacactccgcgagatgcgcaagagatccggtgtgggcggattcgacttcatgccatctcccccacctacctactacaagaacctcaagaagcgcgtgggcgatgttctgagcgaggagcaaattgaggagtgcgaggagctcggtatcctggttgatagagatgaccagggcactctcctgcaaattttcacaaagcccctcggcgacaggccaactattttcatcgagattatccagagagtgggctgcatgaagagggacgaggagggaaaggtttaccaatccggtggctgcggaggtttcggcaagggaaatttctccgagctgttcaagtctatcgaggagtacgagaagacactcgaggctaagcagctggtgggctga

SEQ ID NO: 90 - protein, 440 aa, Artificial Sequence
  BnHPPDm-F372A Amino Acid Sequence
MGHENAAVCETQQHDDAASPGFKLVGFSKFVRKNPKSDKFKVKRFHHIEFWCGDATNVSRRFSWGLGMRFSAKSDLSTGNMVHASYLLTSGDLRFLFTAPYSPSLSAGEAQPSATASIPSFDHASCRSFFSSHGLGVRAVAIEVEDAESAFSISVANGAVPSSPPNVLNGAVTIAEVKLYGDVVLRYVSYYNGTVSFLPGFESVDDTSSFPLDYGIRRLDHAVGNVPELGPALTYLAGFTGFHQFAEFTADDVGTAESGLNSAVLANNDEMVLLPINEPVHGTKRKSQIQTFLEHNEGAGLQHLALMSEDIFRTLREMRKRSGVGGFDFMPSPPPTYYKNLKKRVGDVLSEEQIEECEELGILVDRDDQGTLLQIATKPLGDRPTIFIEIIQRVGCMKRDEEGKVYQSGGCGGFGKGNFSELFKSIEEYEKTLEAKQLVG

SEQ ID NO: 91 - DNA, 1323 bp, Artificial Sequence
  BnHPPDm-F372A-01 Nucleotide Sequence
atggggcacgaaaacgccgccgtttgcgaaactcagcagcacgacgacgctgcgtcgcctggattcaagctcgtcggattctccaagttcgtgaggaagaatccaaagtccgacaagttcaaggtaaagcgcttccaccacatcgagttctggtgcggggacgccaccaacgtctcccgccgcttctcgtggggactaggcatgcgattctccgccaaatccgatctctccaccggaaacatggttcacgcctcctacctactcacctccggcgacctccgattcctcttcaccgctccctactctccctctctctccgccggcgaagctcaaccgtccgctacagcctcaatcccatcgttcgatcacgcttcttgccgctccttcttctcttcgcacggactcggcgtgagagccgtagcgatcgaagtcgaagacgctgagtcagcattctcaatcagcgtagcaaacggcgccgttccttcctcccctcctaacgtcctcaacggagccgttacgatcgcggaagttaaactatacggagacgtcgtcctccgttacgttagttattataacggaaccgttagtttcctccccggatttgaatctgttgacgatacgtcgtcgtttccgctagattacggtatacgccgtctcgaccacgcggtgggaaacgtccccgagctcggcccagctttaacttacctcgcggggttcaccggcttccaccagttcgcggagttcactgcagacgacgtgggaacagccgagagcggattgaactcggctgtgctagccaacaacgacgagatggttctgttgccgataaacgagccggttcacgggacgaagaggaagagccagatccagacgtttcttgagcacaacgaaggagccgggctgcagcatttggctctgatgagcgaagatatattcaggacgctgagggagatgaggaagaggagcggcgttggagggttcgacttcatgccttctcctccgcctacttattacaagaatctcaagaaaagggttggagatgtgcttagtgaggagcagattgaggagtgtgaggagttggggattcttgtggatagagatgatcaggggacgttgcttcagatcgctacgaaaccacttggtgacaggccgacgatatttatagagataatacagagagtgggatgcatgaagagagatgaggaagggaaggtttaccagagtggaggatgtggtgggtttggtaaaggtaacttctctgagctctttaagtctattgaagagtatgagaagacacttgaagccaaacagcttgtgggttga

SEQ ID NO: 92 - DNA, 1323 bp, Artificial Sequence
  BnHPPDm-F372A-02 Nucleotide Sequence
atgggccacgagaatgccgctgtgtgcgagacccagcaacatgatgacgccgcttctcccggattcaagctcgttggtttcagcaagttcgtgaggaagaacccaaagtctgataagttcaaggtgaagcgcttccaccatattgagttctggtgcggagacgccaccaatgttagcaggcgcttctcatggggccttggaatgcgcttctcagccaagtccgatttgtctactggcaacatggtgcacgctagctacctcctgacatcaggagacctcagattcctgttcaccgctccatacagcccatcactttctgctggagaggctcagccttctgctaccgctagcatcccctcattcgatcacgcttcctgccgctctttcttctcctctcatggtctgggcgtgagagccgttgctattgaggttgaggacgccgagtctgctttctctatcagcgtggccaacggtgctgttcctagctcaccacctaacgtgcttaacggcgccgttactattgctgaggtgaagctttacggcgatgtggttttgcgctacgtgtcctactacaacggcactgtgtcattcttgccaggtttcgagtccgtggatgacacatcctctttccctctcgattacggcatcagaaggctggaccacgccgtgggtaacgttcctgagcttggccccgcccttacctacttggctggtttcactggcttccatcaattcgccgagttcacagctgatgacgttggcaccgctgagtccggacttaactctgccgttttggctaacaatgacgagatggtgcttttgccaattaatgagcctgttcatggcaccaagaggaagagccagatccaaactttccttgagcacaatgagggagccggtttgcagcatcttgctttgatgtcagaggatattttcaggacactccgcgagatgcgcaagagatccggtgtgggcggattcgacttcatgccatctcccccacctacctactacaagaacctcaagaagcgcgtgggcgatgttctgagcgaggagcaaattgaggagtgcgaggagctcggtatcctggttgatagagatgaccagggcactctcctgcaaattgctacaaagcccctcggcgacaggccaactattttcatcgagattatccagagagtgggctgcatgaagagggacgaggagggaaaggtttaccaatccggtggctgcggaggtttcggcaagggaaatttctccgagctgttcaagtctatcgaggagtacgagaagacactcgaggctaagcagctggtgggctga

SEQ ID NO: 93 - protein, 451 aa, Helianthus annuus
  HaHPPD Amino Acid Sequence
MGTEATVAAVVAGDESDHPTSAFKLVGFKNFIRTNPMSDKFTVKNFHHIEFWCSDATNTARRFSWGLGMPIIFKSDLSTGNSTHASYLLRSGHLNFLFTAPYSPSISPTTTTASIPTFSHSASRHFTATHGLAVRAIAVEVEDAETAFAVSVANGAKPSSPPVTLGHNDVVLSEVKLYGDVVLRYVSYKNNTNNNNNNDNDNYIFLPGFEAMDKTSSFQELDYGIRRLDHAVGNVPELAPAVDYVKSFTGFHEFAEFTAEDVGTSESGLNSVVLACNSEMVLIPMNEPVYGTKRKSQIQTYLEHNEGAGVQHLALASEDIFRTLREMRKRSGVGGFEFMPSPPPTYYRNLKSRAGDVLSDEQIKECEELGILVDRDDQGTLLQIFTKPVGDRPTIFIEIIQRVGCMVKDDEGKVQQKAGCGGFGKGNFSELFKSIEEYEKTLEARSTTAAA

SEQ ID NO: 94 - DNA, 1356 bp, Helianthus annuus
  HaHPPD-01 Nucleotide Sequence
atgggaacggaagctaccgtcgccgccgtcgtcgccggagatgaatccgatcaccccacctccgccttcaagcttgtaggcttcaaaaacttcatccgtaccaaccccatgtcggacaaattcaccgtcaaaaacttccaccacatcgagttctggtgctccgacgccaccaacaccgcccgccgcttctcctggggcctcggcatgcccatcatcttcaaatccgatctctccaccggcaactccacccacgcctcctatctcctccgctccggccacctcaacttcctcttcaccgccccttattccccctccatctcccccaccaccaccaccgcttccatccccaccttctcccactccgcctcccgccacttcaccgctacccacggtctcgccgtccgcgccatcgccgttgaagtcgaagacgccgaaaccgccttcgccgttagcgtcgctaacggcgccaaaccctcgtctcccccagtcaccctcggtcacaacgacgtcgtgttgtcagaagttaaattatacggcgacgtcgttttgcgttatgttagttacaaaaataatactaataacaataataacaatgataatgataattatatatttttgcctggatttgaagctatggacaaaacgtcgtcgtttcaggagctagactacggcatccgccggctcgatcacgcggtggggaacgtgccggagctagctccagcggtggactatgtgaaatctttcaccgggtttcacgagttcgctgagttcactgctgaggacgttggaacgagtgaaagcgggctcaactcggtggttttagcgtgtaacagtgagatggttttgataccgatgaacgagccagtgtacgggacgaagaggaagagtcagatacagacgtatttggagcataatgaaggggctggggtgcagcatttggcgttggctagtgaggatatatttaggactttgagagagatgaggaaacggagtggggttggggggtttgagtttatgccgtctccgccacctacttattataggaatttgaagagtcgagcgggcgatgtgttgtcggatgagcagattaaggagtgtgaagagttggggatattggtggatagagatgatcaggggactttgcttcagatttttactaagcctgtgggtgataggccgacgatattcatagagataatacaaagagtagggtgcatggtaaaggatgatgaaggaaaggtgcagcagaaggcagggtgtggagggtttggcaaagggaacttctcggagctttttaaatctattgaggaatatgagaagacacttgaagcaagaagcaccactgctgctgcataa

SEQ ID NO: 95 - DNA, 1356 bp, Artificial Sequence
  HaHPPD-02 Nucleotide Sequence
atgggcactgaggctacagtggccgctgtggttgccggagatgagtccgaccatccaacatctgctttcaagctggttggcttcaagaacttcattagaaccaatcctatgtccgataagttcactgtgaagaacttccaccatatcgagttctggtgctccgacgctaccaatactgccaggcgcttctcttggggacttggtatgcctattatcttcaagtccgatttgtctaccggaaacagcactcatgcttcatacctcctgaggtccggtcaccttaatttcttgttcactgccccctactccccatctattagccctaccactacaaccgcttctatccccacattctcacactccgcctctaggcatttcactgctactcatggacttgccgttcgcgctattgctgtggaggttgaggacgccgagaccgctttcgccgtgagcgttgctaacggtgccaagccctcctctccacctgtgactcttggccacaatgatgtggttctttccgaggtgaagttgtacggagacgtggttttgcgctacgtgtcctacaagaacaatactaacaataacaataacaatgataacgacaattacattttccttccaggtttcgaggctatggataagacaagctcattccaggagcttgattacggtatcagaaggttggaccatgccgtgggcaacgttcctgagttggctcccgccgtggattacgttaagtcattcactggcttccacgagttcgctgagttcacagccgaggacgttggaaccagcgagtcaggtctcaactccgtggttctggcttgcaattctgagatggtgctcattcctatgaacgagcctgtttacggaacaaagcgcaagagccagatccaaacctacctggagcataatgagggcgccggagttcaacacctcgctctggcctcagaggacatcttcaggacactccgcgagatgcgcaagagaagcggtgtgggcggattcgagttcatgccatcacccccacctacctactacagaaacctcaagagcagggctggcgatgtgctgtcagacgagcagattaaggagtgcgaggagctcggaatcctggttgatcgcgatgaccagggtactcttttgcaaattttcacaaagcccgtgggcgaccgcccaaccattttcatcgagattatccaaagagtgggatgcatggttaaggatgacgagggcaaggtgcagcaaaaggctggatgcggtggcttcggcaagggcaatttcagcgagctcttcaagtcaatcgaggagtacgagaagactctggaggccagatctactacagccgctgcctga

SEQ ID NO: 96 - protein, 451 aa, Artificial Sequence
  HaHPPDm-F372A Amino Acid Sequence
MGTEATVAAVVAGDESDHPTSAFKLVGFKNFIRTNPMSDKFTVKNFHHIEFWCSDATNTARRFSWGLGMPIIFKSDLSTGNSTHASYLLRSGHLNFLFTAPYSPSISPTTTTASIPTFSHSASRHFTATHGLAVRAIAVEVEDAETAFAVSVANGAKPSSPPVTLGHNDVVLSEVKLYGDVVLRYVSYKNNTNNNNNNDNDNYIFLPGFEAMDKTSSFQELDYGIRRLDHAVGNVPELAPAVDYVKSFTGFHEFAEFTAEDVGTSESGLNSVVLACNSEMVLIPMNEPVYGTKRKSQIQTYLEHNEGAGVQHLALASEDIFRTLREMRKRSGVGGFEFMPSPPPTYYRNLKSRAGDVLSDEQIKECEELGILVDRDDQGTLLQIATKPVGDRPTIFIEIIQRVGCMVKDDEGKVQQKAGCGGFGKGNFSELFKSIEEYEKTLEARSTTAAA

SEQ ID NO: 97 - DNA, 1356 bp, Artificial Sequence
  HaHPPDm-F372A-01 Nucleotide Sequence
atgggaacggaagctaccgtcgccgccgtcgtcgccggagatgaatccgatcaccccacctccgccttcaagcttgtaggcttcaaaaacttcatccgtaccaaccccatgtcggacaaattcaccgtcaaaaacttccaccacatcgagttctggtgctccgacgccaccaacaccgcccgccgcttctcctggggcctcggcatgcccatcatcttcaaatccgatctctccaccggcaactccacccacgcctcctatctcctccgctccggccacctcaacttcctcttcaccgccccttattccccctccatctcccccaccaccaccaccgcttccatccccaccttctcccactccgcctcccgccacttcaccgctacccacggtctcgccgtccgcgccatcgccgttgaagtcgaagacgccgaaaccgccttcgccgttagcgtcgctaacggcgccaaaccctcgtctcccccagtcaccctcggtcacaacgacgtcgtgttgtcagaagttaaattatacggcgacgtcgttttgcgttatgttagttacaaaaataatactaataacaataataacaatgataatgataattatatatttttgcctggatttgaagctatggacaaaacgtcgtcgtttcaggagctagactacggcatccgccggctcgatcacgcggtggggaacgtgccggagctagctccagcggtggactatgtgaaatctttcaccgggtttcacgagttcgctgagttcactgctgaggacgttggaacgagtgaaagcgggctcaactcggtggttttagcgtgtaacagtgagatggttttgataccgatgaacgagccagtgtacgggacgaagaggaagagtcagatacagacgtatttggagcataatgaaggggctggggtgcagcatttggcgttggctagtgaggatatatttaggactttgagagagatgaggaaacggagtggggttggggggtttgagtttatgccgtctccgccacctacttattataggaatttgaagagtcgagcgggcgatgtgttgtcggatgagcagattaaggagtgtgaagagttggggatattggtggatagagatgatcaggggactttgcttcagattgctactaagcctgtgggtgataggccgacgatattcatagagataatacaaagagtagggtgcatggtaaaggatgatgaaggaaaggtgcagcagaaggcagggtgtggagggtttggcaaagggaacttctcggagctttttaaatctattgaggaatatgagaagacacttgaagcaagaagcaccactgctgctgcataa

SEQ ID NO: 98 - DNA, 1356 bp, Artificial Sequence
  HaHPPDm-F372A-02 Nucleotide Sequence
atgggcactgaggctacagtggccgctgtggttgccggagatgagtccgaccatccaacatctgctttcaagctggttggcttcaagaacttcattagaaccaatcctatgtccgataagttcactgtgaagaacttccaccatatcgagttctggtgctccgacgctaccaatactgccaggcgcttctcttggggacttggtatgcctattatcttcaagtccgatttgtctaccggaaacagcactcatgcttcatacctcctgaggtccggtcaccttaatttcttgttcactgccccctactccccatctattagccctaccactacaaccgcttctatccccacattctcacactccgcctctaggcatttcactgctactcatggacttgccgttcgcgctattgctgtggaggttgaggacgccgagaccgctttcgccgtgagcgttgctaacggtgccaagccctcctctccacctgtgactcttggccacaatgatgtggttctttccgaggtgaagttgtacggagacgtggttttgcgctacgtgtcctacaagaacaatactaacaataacaataacaatgataacgacaattacattttccttccaggtttcgaggctatggataagacaagctcattccaggagcttgattacggtatcagaaggttggaccatgccgtgggcaacgttcctgagttggctcccgccgtggattacgttaagtcattcactggcttccacgagttcgctgagttcacagccgaggacgttggaaccagcgagtcaggtctcaactccgtggttctggcttgcaattctgagatggtgctcattcctatgaacgagcctgtttacggaacaaagcgcaagagccagatccaaacctacctggagcataatgagggcgccggagttcaacacctcgctctggcctcagaggacatcttcaggacactccgcgagatgcgcaagagaagcggtgtgggcggattcgagttcatgccatcacccccacctacctactacagaaacctcaagagcagggctggcgatgtgctgtcagacgagcagattaaggagtgcgaggagctcggaatcctggttgatcgcgatgaccagggtactcttttgcaaattgctacaaagcccgtgggcgaccgcccaaccattttcatcgagattatccaaagagtgggatgcatggttaaggatgacgagggcaaggtgcagcaaaaggctggatgcggtggcttcggcaagggcaatttcagcgagctcttcaagtcaatcgaggagtacgagaagactctggaggccagatctactacagccgctgcctga

SEQ ID NO: 99 - protein, 435 aa, Medicago sativa
  MsHPPD Amino Acid Sequence
MAIETETQTQTGFKLVGFKNFVRANPKSDRFKVKRFHHVEFWCTDATNTARRFSHGLGMPIVAKSDLSTGNQTHASYLLRSGDLNFLFSAAYSPSISLSSPSSTAAIPTFSASNCFSFSASHGLAVRAVAVEVEDAELAFTTSVNNGAIPSSPPVILENHVKLAEVRLYGDVVLRYVSYNDPNPNQNPNLLFLPGFERVSDESSNSSLDFGIRRLDHAVGNVPELSSAVKYVKDFTGFHEFAEFTAEDVGTSESGLNSVVLANNEETVLLPMNEPVYGTKRKSQIETYLEHNEGAGLQHLALKSEDIFRTLREMRKRSGVGGFEFMPSPPVTYYRNLKNRVGDVLSDEQIKECEELGILVDRDDQGTLLQIFTKPIGDRPTIFIEIIQRVGCMLKDEEGKEYQKGGCGGFGKGNFSELFKSIEEYEKTLETRRTA

SEQ ID NO: 100 - DNA, 1308 bp, Medicago sativa
  MsHPPD-01 Nucleotide Sequence
atggccatcgaaacagaaactcaaacccaaaccgggttcaaactagttgggttcaagaacttcgtccgagccaatccaaaatcagaccggttcaaagtaaaacgcttccaccatgttgagttctggtgcaccgacgcaacaaacaccgcacgccgtttctctcacggactcggaatgccgattgtcgctaaatcagacctctccaccggaaatcaaactcacgcctcctatctcctccgctccggtgacctcaacttcctcttctccgccgcttattccccttccatttctctctcctcaccttcctcaactgccgcaatccccactttctccgcatccaattgtttctccttctccgcttcccacggcctcgccgtccgtgctgttgctgttgaagtcgaagacgccgaactggctttcaccaccagcgtaaacaacggtgccattccatcgtctcctccagttatcctcgaaaaccacgtcaaactggccgaagttcgtctctacggcgacgttgttctacgttacgtcagttacaacgacccgaacccaaaccagaatccgaacctgctcttcctccctggttttgaacgtgtatcagatgaatcatctaattcatcgttagatttcggaatccggcgactagaccatgccgttggaaatgtaccggagctttcatccgctgtgaaatacgtgaaagatttcaccggatttcatgaatttgctgagtttacagcggaagacgttggaacgagtgagagtggattaaactcagtggtgttagctaacaatgaagaaacagtgttgcttccgatgaatgaaccggtttatggaacaaagaggaagagtcaaatagaaacgtatttggaacataatgaaggtgctgggttacaacatttggcattgaagtctgaggatatatttaggacattgagggaaatgagaaagagaagtggtgttggtgggtttgagtttatgccttctcctccggtcacttattatcgtaatttgaagaatcgcgttggcgatgttttgagtgatgaacagattaaggagtgtgaagagcttgggattttggttgatagagatgatcagggtactctgcttcagatttttaccaagcctattggagataggccaaccatatttatagagataattcagagagttggatgcatgctcaaggacgaagaagggaaggagtatcaaaagggaggatgtgggggctttggaaaaggaaacttctcggagcttttcaaatccattgaagagtatgagaagactttggaaactagaagaactgcatga

SEQ ID NO: 101 - DNA, 1308 bp, Artificial Sequence
  MsHPPD-02 Nucleotide Sequence
atggccattgagacagagacccagactcaaacaggcttcaagcttgttggattcaagaacttcgtgcgcgctaatccaaagagcgatcgcttcaaggttaagagattccaccatgtggagttctggtgcactgacgccaccaacactgctaggcgcttctcacacggcctcggaatgcctatcgttgccaagagcgatctgtcaacaggaaaccagacccatgcttcctacctcctgaggtctggtgaccttaatttcttgttctccgccgcttactccccatctattagcttgtcctctcctagctcaactgccgctatccccacattctcagcctccaattgcttctctttcagcgcttcacatggacttgctgtgcgcgctgtggctgttgaggtggaggatgccgagctggctttcaccacttctgttaacaatggcgccattccctcctctccacctgtgatccttgagaaccatgttaagcttgctgaggtgagattgtacggagatgtggttttgcgctacgtgtcctacaatgaccctaaccccaatcaaaaccctaatcttttgttcctccccggattcgagagggtgtctgacgagagctcaaactcctctcttgatttcggcattagaaggttggaccacgccgttggaaatgtgccagagctgagctcagctgtgaagtatgtgaaggatttcacaggattccatgagttcgccgagttcaccgctgaggacgtgggtacttccgagtctggcctcaacagcgtggttctggctaacaatgaggagaccgttctcctgcctatgaacgagcctgtgtacggtactaagagaaagagccagattgagacatacctcgagcacaacgagggtgccggcctgcaacatctcgctctgaagtcagaggatatcttcagaaccctcagggagatgaggaagcgctccggtgttggcggattcgagttcatgccttctcccccagtgacttactacaggaaccttaagaatcgcgttggcgatgtgttgtccgacgagcagattaaggagtgcgaggagctcggtatcctggttgatagggatgaccagggcacacttttgcaaattttcaccaagcccatcggcgaccgcccaaccattttcatcgagattatccagagagtgggatgcatgctgaaggacgaggagggcaaggagtaccaaaagggtggctgcggaggtttcggaaagggtaacttcagcgagcttttcaagtcaatcgaggagtacgagaagacattggagacccgcagaactgcctga

SEQ ID NO: 102 - protein, 435 aa, Artificial Sequence
  MsHPPDm-F372A Amino Acid Sequence
MAIETETQTQTGFKLVGFKNFVRANPKSDRFKVKRFHHVEFWCTDATNTARRFSHGLGMPIVAKSDLSTGNQTHASYLLRSGDLNFLFSAAYSPSISLSSPSSTAAIPTFSASNCFSFSASHGLAVRAVAVEVEDAELAFTTSVNNGAIPSSPPVILENHVKLAEVRLYGDVVLRYVSYNDPNPNQNPNLLFLPGFERVSDESSNSSLDFGIRRLDHAVGNVPELSSAVKYVKDFTGFHEFAEFTAEDVGTSESGLNSVVLANNEETVLLPMNEPVYGTKRKSQIETYLEHNEGAGLQHLALKSEDIFRTLREMRKRSGVGGFEFMPSPPVTYYRNLKNRVGDVLSDEQIKECEELGILVDRDDQGTLLQIATKPIGDRPTIFIEIIQRVGCMLKDEEGKEYQKGGCGGFGKGNFSELFKSIEEYEKTLETRRTA

SEQ ID NO: 103 - DNA, 1308 bp, Artificial Sequence
  MsHPPDm-F372A-01 Nucleotide Sequence
atggccatcgaaacagaaactcaaacccaaaccgggttcaaactagttgggttcaagaacttcgtccgagccaatccaaaatcagaccggttcaaagtaaaacgcttccaccatgttgagttctggtgcaccgacgcaacaaacaccgcacgccgtttctctcacggactcggaatgccgattgtcgctaaatcagacctctccaccggaaatcaaactcacgcctcctatctcctccgctccggtgacctcaacttcctcttctccgccgcttattccccttccatttctctctcctcaccttcctcaactgccgcaatccccactttctccgcatccaattgtttctccttctccgcttcccacggcctcgccgtccgtgctgttgctgttgaagtcgaagacgccgaactggctttcaccaccagcgtaaacaacggtgccattccatcgtctcctccagttatcctcgaaaaccacgtcaaactggccgaagttcgtctctacggcgacgttgttctacgttacgtcagttacaacgacccgaacccaaaccagaatccgaacctgctcttcctccctggttttgaacgtgtatcagatgaatcatctaattcatcgttagatttcggaatccggcgactagaccatgccgttggaaatgtaccggagctttcatccgctgtgaaatacgtgaaagatttcaccggatttcatgaatttgctgagtttacagcggaagacgttggaacgagtgagagtggattaaactcagtggtgttagctaacaatgaagaaacagtgttgcttccgatgaatgaaccggtttatggaacaaagaggaagagtcaaatagaaacgtatttggaacataatgaaggtgctgggttacaacatttggcattgaagtctgaggatatatttaggacattgagggaaatgagaaagagaagtggtgttggtgggtttgagtttatgccttctcctccggtcacttattatcgtaatttgaagaatcgcgttggcgatgttttgagtgatgaacagattaaggagtgtgaagagcttgggattttggttgatagagatgatcagggtactctgcttcagattgctaccaagcctattggagataggccaaccatatttatagagataattcagagagttggatgcatgctcaaggacgaagaagggaaggagtatcaaaagggaggatgtgggggctttggaaaaggaaacttctcggagcttttcaaatccattgaagagtatgagaagactttggaaactagaagaactgcatga

SEQ ID NO: 104 - DNA, 1308 bp, Artificial Sequence
  MsHPPDm-F372A-02 Nucleotide Sequence
atggccattgagacagagacccagactcaaacaggcttcaagcttgttggattcaagaacttcgtgcgcgctaatccaaagagcgatcgcttcaaggttaagagattccaccatgtggagttctggtgcactgacgccaccaacactgctaggcgcttctcacacggcctcggaatgcctatcgttgccaagagcgatctgtcaacaggaaaccagacccatgcttcctacctcctgaggtctggtgaccttaatttcttgttctccgccgcttactccccatctattagcttgtcctctcctagctcaactgccgctatccccacattctcagcctccaattgcttctctttcagcgcttcacatggacttgctgtgcgcgctgtggctgttgaggtggaggatgccgagctggctttcaccacttctgttaacaatggcgccattccctcctctccacctgtgatccttgagaaccatgttaagcttgctgaggtgagattgtacggagatgtggttttgcgctacgtgtcctacaatgaccctaaccccaatcaaaaccctaatcttttgttcctccccggattcgagagggtgtctgacgagagctcaaactcctctcttgatttcggcattagaaggttggaccacgccgttggaaatgtgccagagctgagctcagctgtgaagtatgtgaaggatttcacaggattccatgagttcgccgagttcaccgctgaggacgtgggtacttccgagtctggcctcaacagcgtggttctggctaacaatgaggagaccgttctcctgcctatgaacgagcctgtgtacggtactaagagaaagagccagattgagacatacctcgagcacaacgagggtgccggcctgcaacatctcgctctgaagtcagaggatatcttcagaaccctcagggagatgaggaagcgctccggtgttggcggattcgagttcatgccttctcccccagtgacttactacaggaaccttaagaatcgcgttggcgatgtgttgtccgacgagcagattaaggagtgcgaggagctcggtatcctggttgatagggatgaccagggcacacttttgcaaattgctaccaagcccatcggcgaccgcccaaccattttcatcgagattatccagagagtgggatgcatgctgaaggacgaggagggcaaggagtaccaaaagggtggctgcggaggtttcggaaagggtaacttcagcgagcttttcaagtcaatcgaggagtacgagaagacattggagacccgcagaactgcctga

SEQ ID NO: 105 - protein, 434 aa, Beta vulgaris
  BvHPPD Amino Acid Sequence
MGTLSPQPQTSPSQFKLVGYSNFIRVNPLSDLFPVKRFHHVEFWCGDATNVSRRFSWGLGMPIVAKSDLSTGNSVHASYLLRSGELHFLFTSPYSPSLSSPSSATIPTFSFSLFTSFLTSHGLAVRAVAVEVQDAEAAFHISVSNGASPVSPPIRLHDGVVLSEVHLYGDVVLRYVSTSSVVDGIFLPGFEEMLGESSFQELDFGLRRLDHAVGNVPELAPAIEYVKKFTGFHEFAEFTTEDVGTSESGLNSAVVANNDETVLFPMNEPVYGTKRKSQIQTYLEHNEGAGVQHLALMSEDIFWTLREMRKRSGLGGFEFMPSPPPTYYRNLRNRAADVLSEEQMKECEELGILVDKDDQGTLLQIFTKPIGDRPTMFIEIIQRIGCMMKDEEGKVYQKGGCGGFGKGNFSELFKSIEEYEKTLERKPIADTNAT

SEQ ID NO: 106 - DNA, 1305 bp, Beta vulgaris
  BvHPPD-01 Nucleotide Sequence
atgggaactctcagtccacaaccacaaacctcaccttcacaattcaagctcgttggctattccaacttcatccgcgtcaacccactctccgaccttttccccgtcaaacgcttccaccacgtcgagttctggtgcggcgacgccaccaacgtctctcgtcgtttctcatggggtctcggcatgcccatcgtcgcaaaatccgatctctccactggtaactccgtccatgcttcttatctccttcgttcaggcgaacttcatttcctcttcacttccccttactctccttctctctcctctccttcttccgccaccatccccaccttctctttctctctcttcacctccttcctcacctcccatggcctcgctgtccgcgccgtcgctgttgaagtccaagacgctgaggccgcctttcatattagtgtctccaatggagcttccccagtttctccaccaatacgcctacatgatggggttgttttatccgaggttcacttatacggcgacgttgttctacgctatgttagtactagttctgttgttgatgggatttttctccctgggtttgaggaaatgttaggggaatcatcgtttcaagagcttgatttcgggttaagaaggttagaccatgctgtaggaaatgtacctgagcttgctcctgctattgagtatgttaagaagtttactgggtttcatgagtttgctgagtttactactgaggatgttgggacgagtgagagtgggttgaattcagctgttgtggcgaataatgatgagactgttttgtttcctatgaatgagccggtgtatgggacgaagaggaagagtcagatacagacttatttggagcataatgagggagctggtgtgcagcatttggcattgatgagtgaggatatattttggactctaagggagatgaggaagagaagtggacttggtgggtttgagtttatgccgtcgccgcctccgacgtattaccggaaccttaggaatcgagctgctgatgttttgagtgaggagcagatgaaagaatgtgaggaattggggattttggtggataaggatgatcagggtactctacttcagatcttcactaagcctattggagacaggccaactatgttcattgagattatccaaagaatcggatgcatgatgaaagatgaagaaggcaaggtgtaccaaaagggcggttgcggaggatttggaaagggaaacttttcagagctctttaaatcgatcgaggagtatgagaagacactcgaacgcaaacccattgcagatacaaatgctacatga

SEQ ID NO: 107 - DNA, 1305 bp, Artificial Sequence
  BvHPPD-02 Nucleotide Sequence
atgggtactctgtccccacagccacaaacatccccttctcagttcaagcttgttggctacagcaacttcattcgcgtgaatccactttcagatttgttccctgttaagagattccaccatgtggagttctggtgcggcgacgccaccaacgttagcaggcgcttctcatggggcctgggaatgccaatcgttgccaagagcgatctttcaactggcaattccgtgcacgcttcttacctcctgcgctccggagagctccatttcctgttcacatctccttacagcccctcactgtcctctcccagctcagccacaattccaaccttctccttctctcttttcaccagcttcttgacttcacacggactcgccgtgagagccgtggctgttgaggtgcaggatgctgaggccgctttccatattagcgtttcaaacggtgcttcccctgtgtctccacctatcaggctgcacgatggagtggttctgtccgaggttcatctttacggtgacgtggttcttcgctacgtgtctacttcctctgtggttgacggcattttcttgcccggattcgaggagatgctcggcgagagctcattccaagagttggatttcggccttagaaggttggaccacgccgttggaaatgtgccagagctcgcccctgctatcgagtatgtgaagaagttcaccggattccatgagttcgctgagttcaccactgaggatgtgggtacctccgagtctggcttgaactctgccgtggttgctaacaatgacgagacagttctcttccccatgaatgagccagtgtacggtaccaagaggaagagccagattcaaacttacctcgagcacaacgagggtgccggcgttcagcatctcgctctgatgtcagaggatatcttctggaccttgagagagatgcgcaagagaagcggactcggcggattcgagttcatgccttcacccccacctacttactacaggaacctgaggaatcgcgccgctgacgttctttccgaggagcagatgaaggagtgcgaggagctcggtatcctggtggataaggatgaccagggcacacttttgcaaattttcaccaagcctatcggcgacagacccacaatgttcattgagattatccagaggatcggatgcatgatgaaggatgaggagggcaaggtgtaccaaaagggtggctgcggaggtttcggaaagggtaacttctccgagttgttcaagtctattgaggagtacgagaagaccctcgagcgcaagccaatcgccgacactaatgctacatga

SEQ ID NO: 108 - protein, 434 aa, Artificial Sequence
  BvHPPDm-F372A Amino Acid Sequence
MGTLSPQPQTSPSQFKLVGYSNFIRVNPLSDLFPVKRFHHVEFWCGDATNVSRRFSWGLGMPIVAKSDLSTGNSVHASYLLRSGELHFLFTSPYSPSLSSPSSATIPTFSFSLFTSFLTSHGLAVRAVAVEVQDAEAAFHISVSNGASPVSPPIRLHDGVVLSEVHLYGDVVLRYVSTSSVVDGIFLPGFEEMLGESSFQELDFGLRRLDHAVGNVPELAPAIEYVKKFTGFHEFAEFTTEDVGTSESGLNSAVVANNDETVLFPMNEPVYGTKRKSQIQTYLEHNEGAGVQHLALMSEDIFWTLREMRKRSGLGGFEFMPSPPPTYYRNLRNRAADVLSEEQMKECEELGILVDKDDQGTLLQIATKPIGDRPTMFIEIIQRIGCMMKDEEGKVYQKGGCGGFGKGNFSELFKSIEEYEKTLERKPIADTNAT

SEQ ID NO: 109 - DNA, 1305 bp, Artificial Sequence
  BvHPPDm-F372A-01 Nucleotide Sequence
atgggaactctcagtccacaaccacaaacctcaccttcacaattcaagctcgttggctattccaacttcatccgcgtcaacccactctccgaccttttccccgtcaaacgcttccaccacgtcgagttctggtgcggcgacgccaccaacgtctctcgtcgtttctcatggggtctcggcatgcccatcgtcgcaaaatccgatctctccactggtaactccgtccatgcttcttatctccttcgttcaggcgaacttcatttcctcttcacttccccttactctccttctctctcctctccttcttccgccaccatccccaccttctctttctctctcttcacctccttcctcacctcccatggcctcgctgtccgcgccgtcgctgttgaagtccaagacgctgaggccgcctttcatattagtgtctccaatggagcttccccagtttctccaccaatacgcctacatgatggggttgttttatccgaggttcacttatacggcgacgttgttctacgctatgttagtactagttctgttgttgatgggatttttctccctgggtttgaggaaatgttaggggaatcatcgtttcaagagcttgatttcgggttaagaaggttagaccatgctgtaggaaatgtacctgagcttgctcctgctattgagtatgttaagaagtttactgggtttcatgagtttgctgagtttactactgaggatgttgggacgagtgagagtgggttgaattcagctgttgtggcgaataatgatgagactgttttgtttcctatgaatgagccggtgtatgggacgaagaggaagagtcagatacagacttatttggagcataatgagggagctggtgtgcagcatttggcattgatgagtgaggatatattttggactctaagggagatgaggaagagaagtggacttggtgggtttgagtttatgccgtcgccgcctccgacgtattaccggaaccttaggaatcgagctgctgatgttttgagtgaggagcagatgaaagaatgtgaggaattggggattttggtggataaggatgatcagggtactctacttcagatcgctactaagcctattggagacaggccaactatgttcattgagattatccaaagaatcggatgcatgatgaaagatgaagaaggcaaggtgtaccaaaagggcggttgcggaggatttggaaagggaaacttttcagagctctttaaatcgatcgaggagtatgagaagacactcgaacgcaaacccattgcagatacaaatgctacatga

SEQ ID NO: 110 - DNA, 1305 bp, Artificial Sequence
  BvHPPDm-F372A-02 Nucleotide Sequence
atgggtactctgtccccacagccacaaacatccccttctcagttcaagcttgttggctacagcaacttcattcgcgtgaatccactttcagatttgttccctgttaagagattccaccatgtggagttctggtgcggcgacgccaccaacgttagcaggcgcttctcatggggcctgggaatgccaatcgttgccaagagcgatctttcaactggcaattccgtgcacgcttcttacctcctgcgctccggagagctccatttcctgttcacatctccttacagcccctcactgtcctctcccagctcagccacaattccaaccttctccttctctcttttcaccagcttcttgacttcacacggactcgccgtgagagccgtggctgttgaggtgcaggatgctgaggccgctttccatattagcgtttcaaacggtgcttcccctgtgtctccacctatcaggctgcacgatggagtggttctgtccgaggttcatctttacggtgacgtggttcttcgctacgtgtctacttcctctgtggttgacggcattttcttgcccggattcgaggagatgctcggcgagagctcattccaagagttggatttcggccttagaaggttggaccacgccgttggaaatgtgccagagctcgcccctgctatcgagtatgtgaagaagttcaccggattccatgagttcgctgagttcaccactgaggatgtgggtacctccgagtctggcttgaactctgccgtggttgctaacaatgacgagacagttctcttccccatgaatgagccagtgtacggtaccaagaggaagagccagattcaaacttacctcgagcacaacgagggtgccggcgttcagcatctcgctctgatgtcagaggatatcttctggaccttgagagagatgcgcaagagaagcggactcggcggattcgagttcatgccttcacccccacctacttactacaggaacctgaggaatcgcgccgctgacgttctttccgaggagcagatgaaggagtgcgaggagctcggtatcctggtggataaggatgaccagggcacacttttgcaaattgctaccaagcctatcggcgacagacccacaatgttcattgagattatccagaggatcggatgcatgatgaaggatgaggagggcaaggtgtaccaaaagggtggctgcggaggtttcggaaagggtaacttctccgagttgttcaagtctattgaggagtacgagaagaccctcgagcgcaagccaatcgccgacactaatgctacatga

SEQ ID NO: 111 - protein, 447 aa, Nicotiana tabacum
  NtHPPD Amino Acid Sequence
MGKLETVTTTSAAAADDSSELTTNFKLVGFKNFIRTNPRSDFFSVKSFHHIEFWCGDATNTARRFSWSLGMPIAAKSDLSTGNSVHASYLLRPVSGSLQFLFTAPYSPSISTPSSAAIPSFSTSTHRSFTTTHGLGVRAVALEVENAYTAFSASVSRGAKPMFEPVTIDEQVAMAEVHLYGDVVLRFVSYLKDADNLVFLPGFEAMDETASYKELDYGIRRLDHAVGNVPELGPVVDYIKRFTGFHEFAEFTAEDVGTAESGLNSMVLANNDETVLLPLNEPVYGTKRKSQIQTYLEHNEGAGVQHLALVTEDIFKTLTEMRKRSGVGGFEFMPSPPPTYYKNLKNRAGDVLSDEQILACEELGILVDRDDQGTLLQIFTKPVGDRPTIFIEIIQRIGCMLKDGKGQVYQKGGCGGFGKGNFSELFRSIEEYEKTLEAKQANQVAAA

SEQ ID NO: 112 - DNA, 1344 bp, Nicotiana tabacum
  NtHPPD-01 Nucleotide Sequence
atgggcaaattagaaactgtcaccaccacctctgctgccgctgccgatgactcatcggagctgaccaccaatttcaagctagtgggtttcaagaattttattcgaaccaatccccgttccgattttttctccgttaaaagcttccatcacatagaattttggtgcggcgatgctaccaatacggctcgccgtttctcttggtctctcgggatgccaattgcagctaaatccgacctctccactggaaactccgttcacgcttcgtacctcctccgtcccgtttcaggttcgcttcagttcctcttcactgctccttattcgccgtctatttcgacgccgtcatctgcagccatccccagtttctctacttccacacaccgctcttttacgacaactcacgggctcggcgtccgtgccgttgctttggaagtggagaatgcttacacggcgttctctgcgagtgtttcacgtggggcgaaacccatgtttgaacctgtgactattgatgaacaagtcgctatggctgaagttcacttatacggcgacgtcgttttgcggtttgtgagctatctgaaagatgcggacaacctcgttttcctcccaggtttcgaggccatggatgaaacagcatcatacaaagaactagattatgggattcgccggctggaccatgctgttgggaatgtgccggagctgggtcctgtagtggattatatcaagcgctttacggggtttcatgaattcgccgagttcacagctgaagatgttgggactgctgagagcgggctgaactctatggtcctggcaaacaatgacgaaacagtgctgcttccgttgaatgagccggtttatggaaccaaaaggaagagtcaaattcaaacgtatttagagcacaatgaaggggcaggagtgcaacatttagctttggttacagaggatatatttaaaacattgacggaaatgaggaaaaggagtggagttgggggttttgaattcatgccttcacctccgcctacttattataagaatttgaagaatagggcaggggatgtactgagtgatgaacagattctggcttgcgaagaattgggaatattagtggatagggatgatcaggggaccctgctacagatattcaccaagcctgtgggggacaggccaacaatatttatagaaataattcagagaatcggttgcatgctcaaagacggaaaaggtcaggtgtatcagaagggcggctgtggaggcttcggaaagggaaacttttcagagctctttagatccatcgaagaatatgagaagacgcttgaagccaaacaagctaatcaagttgctgctgcttga

SEQ ID NO: 113 - DNA, 1344 bp, Artificial Sequence
  NtHPPD-02 Nucleotide Sequence
atgggcaagctggagacagtgaccactacatcagccgctgccgctgatgactcctctgagctcaccactaacttcaagctggttggattcaagaacttcattaggaccaatcctcgctccgatttcttctctgtgaagagcttccaccatatcgagttctggtgcggtgacgccacaaacaccgctaggcgcttctcctggtctttgggtatgccaattgccgctaagtcagatctctccacaggcaattctgttcacgccagctacctcctgaggcctgtgagcggctcactccagttcctgttcacagctccatactccccttctattagcacccctagctcagccgctatcccctcattctccacttctacacaccgctccttcacaaccactcatggcttgggagtgagagctgttgccctcgaggttgagaatgcttacactgccttcagcgcttcagtgtccagaggtgccaagcccatgttcgagccagttacaatcgatgagcaagtggctatggccgaggttcatctttacggcgacgtggttttgaggttcgtttcttacctcaaggatgccgacaaccttgtgttcttgcccggcttcgaggccatggatgagactgctagctacaaggagctggattacggaattagaaggcttgaccacgctgtgggaaatgttcctgagttgggtcccgtggttgactacatcaagcgcttcactggattccatgagttcgccgagttcacagctgaggatgttggtaccgccgagtcaggccttaactccatggtgttggctaacaatgacgagacagttcttttgccattgaatgagcctgtgtacggcaccaagagaaagtctcagattcaaacttacctcgagcacaacgagggtgccggcgtgcagcatcttgctttggttaccgaggatatcttcaagaccctgactgagatgcgcaagagatcaggagtgggcggattcgagttcatgccatccccacctcccacttactacaagaaccttaagaatagggccggcgatgtgctgagcgacgagcagattcttgcttgcgaggagctcggcatcctggttgatcgcgatgaccagggaactctcctgcaaattttcacaaagcccgtgggagacagaccaaccattttcatcgagattatccaaaggatcggttgcatgctcaaggacggaaagggtcaggtttaccaaaagggtggctgcggaggtttcggcaagggaaacttctctgagctgttccgcagcattgaggagtacgagaagactcttgaggccaagcaggctaatcaagtggccgctgcctga

SEQ ID NO: 114 - protein, 447 aa, Artificial Sequence
  NtHPPDm-F372A Amino Acid Sequence
MGKLETVTTTSAAAADDSSELTTNFKLVGFKNFIRTNPRSDFFSVKSFHHIEFWCGDATNTARRFSWSLGMPIAAKSDLSTGNSVHASYLLRPVSGSLQFLFTAPYSPSISTPSSAAIPSFSTSTHRSFTTTHGLGVRAVALEVENAYTAFSASVSRGAKPMFEPVTIDEQVAMAEVHLYGDVVLRFVSYLKDADNLVFLPGFEAMDETASYKELDYGIRRLDHAVGNVPELGPVVDYIKRFTGFHEFAEFTAEDVGTAESGLNSMVLANNDETVLLPLNEPVYGTKRKSQIQTYLEHNEGAGVQHLALVTEDIFKTLTEMRKRSGVGGFEFMPSPPPTYYKNLKNRAGDVLSDEQILACEELGILVDRDDQGTLLQIATKPVGDRPTIFIEIIQRIGCMLKDGKGQVYQKGGCGGFGKGNFSELFRSIEEYEKTLEAKQANQVAAA

SEQ ID NO: 115 - DNA, 1344 bp, Artificial Sequence
  NtHPPDm-F372A-01 Nucleotide Sequence
atgggcaaattagaaactgtcaccaccacctctgctgccgctgccgatgactcatcggagctgaccaccaatttcaagctagtgggtttcaagaattttattcgaaccaatccccgttccgattttttctccgttaaaagcttccatcacatagaattttggtgcggcgatgctaccaatacggctcgccgtttctcttggtctctcgggatgccaattgcagctaaatccgacctctccactggaaactccgttcacgcttcgtacctcctccgtcccgtttcaggttcgcttcagttcctcttcactgctccttattcgccgtctatttcgacgccgtcatctgcagccatccccagtttctctacttccacacaccgctcttttacgacaactcacgggctcggcgtccgtgccgttgctttggaagtggagaatgcttacacggcgttctctgcgagtgtttcacgtggggcgaaacccatgtttgaacctgtgactattgatgaacaagtcgctatggctgaagttcacttatacggcgacgtcgttttgcggtttgtgagctatctgaaagatgcggacaacctcgttttcctcccaggtttcgaggccatggatgaaacagcatcatacaaagaactagattatgggattcgccggctggaccatgctgttgggaatgtgccggagctgggtcctgtagtggattatatcaagcgctttacggggtttcatgaattcgccgagttcacagctgaagatgttgggactgctgagagcgggctgaactctatggtcctggcaaacaatgacgaaacagtgctgcttccgttgaatgagccggtttatggaaccaaaaggaagagtcaaattcaaacgtatttagagcacaatgaaggggcaggagtgcaacatttagctttggttacagaggatatatttaaaacattgacggaaatgaggaaaaggagtggagttgggggttttgaattcatgccttcacctccgcctacttattataagaatttgaagaatagggcaggggatgtactgagtgatgaacagattctggcttgcgaagaattgggaatattagtggatagggatgatcaggggaccctgctacagatagctaccaagcctgtgggggacaggccaacaatatttatagaaataattcagagaatcggttgcatgctcaaagacggaaaaggtcaggtgtatcagaagggcggctgtggaggcttcggaaagggaaacttttcagagctctttagatccatcgaagaatatgagaagacgcttgaagccaaacaagctaatcaagttgctgctgcttga

SEQ ID NO: 116 - DNA, 1344 bp, Artificial Sequence
  NtHPPDm-F372A-02 Nucleotide Sequence
atgggcaagctggagacagtgaccactacatcagccgctgccgctgatgactcctctgagctcaccactaacttcaagctggttggattcaagaacttcattaggaccaatcctcgctccgatttcttctctgtgaagagcttccaccatatcgagttctggtgcggtgacgccacaaacaccgctaggcgcttctcctggtctttgggtatgccaattgccgctaagtcagatctctccacaggcaattctgttcacgccagctacctcctgaggcctgtgagcggctcactccagttcctgttcacagctccatactccccttctattagcacccctagctcagccgctatcccctcattctccacttctacacaccgctccttcacaaccactcatggcttgggagtgagagctgttgccctcgaggttgagaatgcttacactgccttcagcgcttcagtgtccagaggtgccaagcccatgttcgagccagttacaatcgatgagcaagtggctatggccgaggttcatctttacggcgacgtggttttgaggttcgtttcttacctcaaggatgccgacaaccttgtgttcttgcccggcttcgaggccatggatgagactgctagctacaaggagctggattacggaattagaaggcttgaccacgctgtgggaaatgttcctgagttgggtcccgtggttgactacatcaagcgcttcactggattccatgagttcgccgagttcacagctgaggatgttggtaccgccgagtcaggccttaactccatggtgttggctaacaatgacgagacagttcttttgccattgaatgagcctgtgtacggcaccaagagaaagtctcagattcaaacttacctcgagcacaacgagggtgccggcgtgcagcatcttgctttggttaccgaggatatcttcaagaccctgactgagatgcgcaagagatcaggagtgggcggattcgagttcatgccatccccacctcccacttactacaagaaccttaagaatagggccggcgatgtgctgagcgacgagcagattcttgcttgcgaggagctcggcatcctggttgatcgcgatgaccagggaactctcctgcaaattgctacaaagcccgtgggagacagaccaaccattttcatcgagattatccaaaggatcggttgcatgctcaaggacggaaagggtcaggtttaccaaaagggtggctgcggaggtttcggcaagggaaacttctctgagctgttccgcagcattgaggagtacgagaagactcttgaggccaagcaggctaatcaagtggccgctgcctga

SEQ ID NO: 117 - protein, 455 aa, Cucumis sativus
  CsHPPD Amino Acid Sequence
MGKEADFPRAPSEATDGGATASQSEFELQGFDNFIRTNPKSDRFKVKRFHHIEFWCTDATNVARRFSWGLGMQIVAKSDLSTGNMTHASYLLRSGHLCFLFTAPYSPSIAAAQNLTPASTASIPSFDHSVCRSFSGTHGFGARAIALEVEDAEIAFRTSVAHGAKPSCPPIVLENRAVLSEVHLYGDVVLRYISYKNPVSGDNGENKPDEWFLPKFEAMEETASFPLDFGIRRLDHAVGNVPELGPAVSYLKGFTGFHEFAEFTAEDVGTSESGLNSMVLANNEEMVLLPINEPVFGTKRKSQIQTYLEHNEGAGVQHLALMSEDIFRTLREMRKRSSVGGFEFMPSPPPTYYKNLKSRAGDVLTDEQIKECEELGILVDKDDQGTLLQIFTKPVGDRPTIFIEIIQRLGCMMKDEEGKAFQKGGCGGFGKGNFSELFKSIEEYEKTLEAKRVSE

SEQ ID NO: 118 - DNA, 1368 bp, Cucumis sativus
  CsHPPD-01 Nucleotide Sequence
atggggaaagaggccgattttcctagagctccgtcggaggcgactgacggcggcgctactgcttcccagtcggagtttgagcttcaaggattcgacaactttattcgtaccaatccgaaatcggatcggtttaaggttaagcggttccatcatattgagttctggtgtaccgacgctaccaatgttgctcggagattctcctggggacttggtatgcagattgtggctaaatcggatctctctaccgggaatatgactcatgcttcttatctcctccgttccggccacctttgctttctcttcaccgcaccttattcgccttccattgccgccgctcaaaaccttactccggcatccactgcttcaatccctagtttcgaccattccgtctgccgttccttctccggtacccatggatttggcgctcgagcaatcgctcttgaggttgaagacgctgagatcgccttcagaaccagcgtcgcacacggtgcgaaaccttcgtgtcctccgattgttctcgaaaatcgcgctgtactttcagaagttcatttgtatggcgatgttgttttgcgttacattagctacaaaaaccctgtgtctggcgataatggcgagaataaaccagacgaatggttcttgccgaaattcgaggccatggaggaaactgcttcatttccgcttgatttcgggattcgaagactggatcatgcagtcggaaatgtgccggagttgggaccggcggtgtcttacttgaaaggcttcactggatttcacgagtttgcagaattcacggcggaggatgtggggacgagtgagagcggattgaattcgatggttctggcaaacaatgaggaaatggttctgctaccgataaacgagccggtttttgggacgaagcgaaagagccaaatacagacgtatttggagcacaacgaaggagcaggagttcagcacttggcattgatgagtgaggatattttcagaaccttgagggagatgaggaaacgaagtagcgtcggtggatttgagttcatgccgtcgccgccgccaacatattacaagaatttgaagagcagggcgggtgatgtgctgacggatgagcagattaaggagtgtgaagaattggggattctggtggataaagatgatcaaggaactttgcttcagatcttcaccaagcccgtgggagataggcctaccatatttattgagataattcagagattgggatgcatgatgaaggatgaagaggggaaagcatttcagaaaggagggtgtggtggctttggaaaaggaaacttctccgagcttttcaaatccattgaagaatatgagaagacacttgaagccaaacgagtttcggaataa

SEQ ID NO: 119 - DNA, 1368 bp, Artificial Sequence
  CsHPPD-02 Nucleotide Sequence
atgggcaaggaggctgatttccctagagctccatctgaggctactgacggcggagctactgccagccagtcagagttcgagcttcaaggcttcgataacttcattagaactaatcctaagtctgacagattcaaggtgaagaggttccaccatatcgagttctggtgcaccgatgccactaacgttgctaggcgcttcagctggggtcttggcatgcagattgtggccaagagcgacttgtcaacaggaaatatgacccacgcttcatacctcctgagatccggtcatctctgcttcctgttcacagccccttactccccctctattgccgctgcccaaaaccttactcccgcctccacagcttctatcccaagcttcgatcactcagtttgcaggagcttctcaggcactcatggattcggtgctcgcgccattgctttggaggttgaggacgccgagatcgctttcaggacatctgttgctcatggtgctaagccaagctgcccacctattgtgcttgagaacagagctgtgctctccgaggttcatctgtacggagatgtggttttgaggtacatctcatacaagaatcctgtttccggagataacggtgaaaataagccagacgagtggttcctgcctaagttcgaggccatggaggagaccgcttcattccccctcgatttcggcattagaaggctggaccacgccgtgggaaatgttccagagcttggtcctgctgtgtcctacttgaagggcttcactggattccatgagttcgccgagttcacagctgaggatgttggtacctccgagtctggccttaactctatggtgttggccaacaatgaggagatggttcttttgcccattaatgagccagtgttcggaaccaagaggaagtctcagatccaaacttacctcgagcacaacgagggcgccggagtgcagcatcttgctttgatgagcgaggacatcttcaggaccctgcgcgagatgcgcaagagatcctctgttggtggcttcgagttcatgccttcacccccacctacatactacaagaatctcaagtcccgcgctggagatgttctgaccgacgagcaaattaaggagtgcgaggagcttggtatcttggtggataaggatgaccagggcactctcctgcaaattttcacaaagcctgttggtgaccgccccacaattttcatcgagattatccagagactcggctgcatgatgaaggacgaggagggaaaggccttccaaaagggaggttgcggcggattcggcaagggcaacttctctgagctcttcaagagcatcgaggagtacgagaagaccctggaggctaagcgcgtgagcgagtga

SEQ ID NO: 120 - protein, 455 aa, Artificial Sequence
  CsHPPDm-F372A Amino Acid Sequence
MGKEADFPRAPSEATDGGATASQSEFELQGFDNFIRTNPKSDRFKVKRFHHIEFWCTDATNVARRFSWGLGMQIVAKSDLSTGNMTHASYLLRSGHLCFLFTAPYSPSIAAAQNLTPASTASIPSFDHSVCRSFSGTHGFGARAIALEVEDAEIAFRTSVAHGAKPSCPPIVLENRAVLSEVHLYGDVVLRYISYKNPVSGDNGENKPDEWFLPKFEAMEETASFPLDFGIRRLDHAVGNVPELGPAVSYLKGFTGFHEFAEFTAEDVGTSESGLNSMVLANNEEMVLLPINEPVFGTKRKSQIQTYLEHNEGAGVQHLALMSEDIFRTLREMRKRSSVGGFEFMPSPPPTYYKNLKSRAGDVLTDEQIKECEELGILVDKDDQGTLLQIATKPVGDRPTIFIEIIQRLGCMMKDEEGKAFQKGGCGGFGKGNFSELFKSIEEYEKTLEAKRVSE

SEQ ID NO: 121 - DNA, 1368 bp, Artificial Sequence
  CsHPPDm-F372A-01 Nucleotide Sequence
atggggaaagaggccgattttcctagagctccgtcggaggcgactgacggcggcgctactgcttcccagtcggagtttgagcttcaaggattcgacaactttattcgtaccaatccgaaatcggatcggtttaaggttaagcggttccatcatattgagttctggtgtaccgacgctaccaatgttgctcggagattctcctggggacttggtatgcagattgtggctaaatcggatctctctaccgggaatatgactcatgcttcttatctcctccgttccggccacctttgctttctcttcaccgcaccttattcgccttccattgccgccgctcaaaaccttactccggcatccactgcttcaatccctagtttcgaccattccgtctgccgttccttctccggtacccatggatttggcgctcgagcaatcgctcttgaggttgaagacgctgagatcgccttcagaaccagcgtcgcacacggtgcgaaaccttcgtgtcctccgattgttctcgaaaatcgcgctgtactttcagaagttcatttgtatggcgatgttgttttgcgttacattagctacaaaaaccctgtgtctggcgataatggcgagaataaaccagacgaatggttcttgccgaaattcgaggccatggaggaaactgcttcatttccgcttgatttcgggattcgaagactggatcatgcagtcggaaatgtgccggagttgggaccggcggtgtcttacttgaaaggcttcactggatttcacgagtttgcagaattcacggcggaggatgtggggacgagtgagagcggattgaattcgatggttctggcaaacaatgaggaaatggttctgctaccgataaacgagccggtttttgggacgaagcgaaagagccaaatacagacgtatttggagcacaacgaaggagcaggagttcagcacttggcattgatgagtgaggatattttcagaaccttgagggagatgaggaaacgaagtagcgtcggtggatttgagttcatgccgtcgccgccgccaacatattacaagaatttgaagagcagggcgggtgatgtgctgacggatgagcagattaaggagtgtgaagaattggggattctggtggataaagatgatcaaggaactttgcttcagatcgctaccaagcccgtgggagataggcctaccatatttattgagataattcagagattgggatgcatgatgaaggatgaagaggggaaagcatttcagaaaggagggtgtggtggctttggaaaaggaaacttctccgagcttttcaaatccattgaagaatatgagaagacacttgaagccaaacgagtttcggaataa

SEQ ID NO: 122 - DNA, 1368 bp, Artificial Sequence
  CsHPPDm-F372A-02 Nucleotide Sequence
atgggcaaggaggctgatttccctagagctccatctgaggctactgacggcggagctactgccagccagtcagagttcgagcttcaaggcttcgataacttcattagaactaatcctaagtctgacagattcaaggtgaagaggttccaccatatcgagttctggtgcaccgatgccactaacgttgctaggcgcttcagctggggtcttggcatgcagattgtggccaagagcgacttgtcaacaggaaatatgacccacgcttcatacctcctgagatccggtcatctctgcttcctgttcacagccccttactccccctctattgccgctgcccaaaaccttactcccgcctccacagcttctatcccaagcttcgatcactcagtttgcaggagcttctcaggcactcatggattcggtgctcgcgccattgctttggaggttgaggacgccgagatcgctttcaggacatctgttgctcatggtgctaagccaagctgcccacctattgtgcttgagaacagagctgtgctctccgaggttcatctgtacggagatgtggttttgaggtacatctcatacaagaatcctgtttccggagataacggtgaaaataagccagacgagtggttcctgcctaagttcgaggccatggaggagaccgcttcattccccctcgatttcggcattagaaggctggaccacgccgtgggaaatgttccagagcttggtcctgctgtgtcctacttgaagggcttcactggattccatgagttcgccgagttcacagctgaggatgttggtacctccgagtctggccttaactctatggtgttggccaacaatgaggagatggttcttttgcccattaatgagccagtgttcggaaccaagaggaagtctcagatccaaacttacctcgagcacaacgagggcgccggagtgcagcatcttgctttgatgagcgaggacatcttcaggaccctgcgcgagatgcgcaagagatcctctgttggtggcttcgagttcatgccttcacccccacctacatactacaagaatctcaagtcccgcgctggagatgttctgaccgacgagcaaattaaggagtgcgaggagcttggtatcttggtggataaggatgaccagggcactctcctgcaaattgctacaaagcctgttggtgaccgccccacaattttcatcgagattatccagagactcggctgcatgatgaaggacgaggagggaaaggccttccaaaagggaggttgcggcggattcggcaagggcaacttctctgagctcttcaagagcatcgaggagtacgagaagaccctggaggctaagcgcgtgagcgagtga

SEQ ID NO: 123 - protein, 447 aa, Solanum tuberosum
  StHPPD Amino Acid Sequence
MGKQAATATATATATADDQQLPADIEDKYKLVGFNNFVRTNPRSDLFNVKRFHHIEFWCGDATNTARRFSWGLGLPIAAKSDLSTGNSVHASYLLRSSSSQLQFLFTAPYSPAISTPSSSSIPTFSVSSHRSFTETHGLGVRAIALEVENSRLAFSTCVSHGAKPVSEPVILNDEVVISEVHLYGDVVLRFVSFLKDSNRFVFLPGFELVEGAQLDYGIRRLDHAVGNVPQLGPVVEYIKSFTGFHEFAEFTAEDVGTAESGLNSVVLANNDETVLFPLNEPVYGTKRKSQIQTYLEHNEGAGVQHLALVTEDIFRTLREMRKRSGIGGFEFMPSPPPTYYKNLKSRAGDILSDEQIKECEELGILVDRDDQGTLLQIFTKPVGDRPTIFLEIIQRIGCMLQNAEGELYQKGGCGGFGKGNFSELFKSIEEYEKTLEAKQNTQVAIA

SEQ ID NO: 124 - DNA, 1344 bp, Solanum tuberosum
  StHPPD-01 Nucleotide Sequence
atgggcaaacaagccgccaccgccaccgccactgccaccgccaccgccgatgaccaacaactccccgccgacattgaagataaatataagctagtgggtttcaacaatttcgttcgtactaatccccgttcagatttattcaatgttaaacgcttccatcacattgaattttggtgcggcgacgctaccaatactgctcgtcgcttttcttggggtctcggtttgccaattgctgctaaatctgatctttctactggaaactccgtccatgcttcttatcttcttcgttcttcttcttcccaacttcaattccttttcactgctccttattcccctgctatctctaccccttcttcttcatcaattccaactttctccgtctcttctcaccgatccttcacggaaacccacggactcggtgtgagagcaatagcattggaagttgaaaattcgcgtttggctttctcgacctgtgtttctcatggggcaaaacccgtttcggaaccagtaattttgaatgatgaagttgtgatttcggaagttcatctctacggcgacgtcgttttgcggtttgtgagttttctgaaagattcgaatagatttgtttttcttccgggttttgaattggtggagggagcccaacttgactatggtattcgccggctggaccacgccgtagggaatgtcccgcagctgggtcccgttgttgagtatatcaaaagctttaccgggtttcatgaatttgcggagtttacagctgaggatgttgggacagctgagagtgggctgaattctgtggtgttggcaaacaatgatgaaactgttttgtttccgctgaatgaaccggtgtatgggactaaaaggaagagtcaaattcagacgtatttggagcacaatgaaggggcaggggtgcagcatttagcattggtaactgaggatatatttagaactttgagggaaatgaggaaaaggagtggtattgggggatttgagtttatgccttcgcctcctccgacgtattataagaatttgaagagcagggcaggggatatactgagcgatgagcaaataaaggaatgtgaagaattggggattttggtggatagggatgatcaggggactctgcttcagatattcacaaagcctgtaggggataggcccacaatttttctcgaaataatccagagaatagggtgcatgctgcaaaacgcggaaggtgagctttatcagaagggtggatgtggaggctttggcaagggaaatttctcagagctctttaaatccatcgaagaatatgaaaagacacttgaagctaaacaaaacactcaagttgccattgcttga

SEQ ID NO: 125 - DNA, 1344 bp, Artificial Sequence
  StHPPD-02 Nucleotide Sequence
atgggaaagcaagctgctactgctactgctacagctaccgctactgccgatgaccagcaacttccagctgatattgaggacaagtacaagttggtgggtttcaacaatttcgttagaactaaccctaggtccgatctcttcaatgtgaagaggttccaccatattgagttctggtgcggtgacgctacaaatactgctaggcgcttctcttggggacttggactgccaattgctgctaagagcgatctgtcaaccggcaattccgttcacgcctcttacctcctgaggtcctctagctcacagctccaattcctgttcactgctccatacagccctgccatttcaacaccttcctctagctcaatccccaccttctccgtgtcctctcaccgctctttcactgagacacatggtctgggcgtgcgcgctatcgcccttgaggttgagaactccagattggctttctccacctgcgtttctcacggagccaagcccgtgagcgagccagttattcttaatgacgaggtggttatctcagaggtgcatctttacggcgatgtggttttgaggttcgtttccttcctcaaggactctaaccgcttcgtgttccttccaggattcgagttggttgagggtgctcagctcgattacggcattagaaggctggaccacgccgtgggaaatgttcctcaactgggtcccgtggttgagtacatcaagagcttcacaggattccatgagttcgctgagttcaccgccgaggatgtgggtactgctgagagcggcctcaactcagtggttctggccaacaatgacgagaccgtgcttttcccattgaatgagcctgtttacggcactaagaggaagtcacagattcaaacataccttgagcacaacgagggagctggtgtgcagcatcttgccttggttacagaggatattttcaggaccttgcgcgagatgcgcaagagatccggcatcggcggattcgagttcatgccttctccacctcccacttactacaagaatctcaagagccgcgctggagatattctgtcagacgagcaaatcaaggagtgcgaggagctcggtattctggtggatagagatgaccagggcactcttttgcaaatcttcacaaagcccgttggcgacagaccaacaattttcctcgagattatccagaggatcggctgcatgcttcaaaacgctgagggagagttgtaccagaagggtggctgcggaggtttcggcaagggaaatttcagcgagctcttcaagtcaattgaggagtacgagaagaccctggaggccaagcagaacactcaagtggctatcgcctga

SEQ ID NO: 126 - protein, 447 aa, Artificial Sequence
  StHPPDm-F372A Amino Acid Sequence
MGKQAATATATATATADDQQLPADIEDKYKLVGFNNFVRTNPRSDLFNVKRFHHIEFWCGDATNTARRFSWGLGLPIAAKSDLSTGNSVHASYLLRSSSSQLQFLFTAPYSPAISTPSSSSIPTFSVSSHRSFTETHGLGVRAIALEVENSRLAFSTCVSHGAKPVSEPVILNDEVVISEVHLYGDVVLRFVSFLKDSNRFVFLPGFELVEGAQLDYGIRRLDHAVGNVPQLGPVVEYIKSFTGFHEFAEFTAEDVGTAESGLNSVVLANNDETVLFPLNEPVYGTKRKSQIQTYLEHNEGAGVQHLALVTEDIFRTLREMRKRSGIGGFEFMPSPPPTYYKNLKSRAGDILSDEQIKECEELGILVDRDDQGTLLQIATKPVGDRPTIFLEIIQRIGCMLQNAEGELYQKGGCGGFGKGNFSELFKSIEEYEKTLEAKQNTQVAIA

SEQ ID NO: 127 - DNA, 1344 bp, Artificial Sequence
  StHPPDm-F372A-01 Nucleotide Sequence
atgggcaaacaagccgccaccgccaccgccactgccaccgccaccgccgatgaccaacaactccccgccgacattgaagataaatataagctagtgggtttcaacaatttcgttcgtactaatccccgttcagatttattcaatgttaaacgcttccatcacattgaattttggtgcggcgacgctaccaatactgctcgtcgcttttcttggggtctcggtttgccaattgctgctaaatctgatctttctactggaaactccgtccatgcttcttatcttcttcgttcttcttcttcccaacttcaattccttttcactgctccttattcccctgctatctctaccccttcttcttcatcaattccaactttctccgtctcttctcaccgatccttcacggaaacccacggactcggtgtgagagcaatagcattggaagttgaaaattcgcgtttggctttctcgacctgtgtttctcatggggcaaaacccgtttcggaaccagtaattttgaatgatgaagttgtgatttcggaagttcatctctacggcgacgtcgttttgcggtttgtgagttttctgaaagattcgaatagatttgtttttcttccgggttttgaattggtggagggagcccaacttgactatggtattcgccggctggaccacgccgtagggaatgtcccgcagctgggtcccgttgttgagtatatcaaaagctttaccgggtttcatgaatttgcggagtttacagctgaggatgttgggacagctgagagtgggctgaattctgtggtgttggcaaacaatgatgaaactgttttgtttccgctgaatgaaccggtgtatgggactaaaaggaagagtcaaattcagacgtatttggagcacaatgaaggggcaggggtgcagcatttagcattggtaactgaggatatatttagaactttgagggaaatgaggaaaaggagtggtattgggggatttgagtttatgccttcgcctcctccgacgtattataagaatttgaagagcagggcaggggatatactgagcgatgagcaaataaaggaatgtgaagaattggggattttggtggatagggatgatcaggggactctgcttcagatagctacaaagcctgtaggggataggcccacaatttttctcgaaataatccagagaatagggtgcatgctgcaaaacgcggaaggtgagctttatcagaagggtggatgtggaggctttggcaagggaaatttctcagagctctttaaatccatcgaagaatatgaaaagacacttgaagctaaacaaaacactcaagttgccattgcttga

SEQ ID NO: 128 - DNA, 1344 bp, Artificial Sequence
  StHPPDm-F372A-02 Nucleotide Sequence
atgggaaagcaagctgctactgctactgctacagctaccgctactgccgatgaccagcaacttccagctgatattgaggacaagtacaagttggtgggtttcaacaatttcgttagaactaaccctaggtccgatctcttcaatgtgaagaggttccaccatattgagttctggtgcggtgacgctacaaatactgctaggcgcttctcttggggacttggactgccaattgctgctaagagcgatctgtcaaccggcaattccgttcacgcctcttacctcctgaggtcctctagctcacagctccaattcctgttcactgctccatacagccctgccatttcaacaccttcctctagctcaatccccaccttctccgtgtcctctcaccgctctttcactgagacacatggtctgggcgtgcgcgctatcgcccttgaggttgagaactccagattggctttctccacctgcgtttctcacggagccaagcccgtgagcgagccagttattcttaatgacgaggtggttatctcagaggtgcatctttacggcgatgtggttttgaggttcgtttccttcctcaaggactctaaccgcttcgtgttccttccaggattcgagttggttgagggtgctcagctcgattacggcattagaaggctggaccacgccgtgggaaatgttcctcaactgggtcccgtggttgagtacatcaagagcttcacaggattccatgagttcgctgagttcaccgccgaggatgtgggtactgctgagagcggcctcaactcagtggttctggccaacaatgacgagaccgtgcttttcccattgaatgagcctgtttacggcactaagaggaagtcacagattcaaacataccttgagcacaacgagggagctggtgtgcagcatcttgccttggttacagaggatattttcaggaccttgcgcgagatgcgcaagagatccggcatcggcggattcgagttcatgccttctccacctcccacttactacaagaatctcaagagccgcgctggagatattctgtcagacgagcaaatcaaggagtgcgaggagctcggtattctggtggatagagatgaccagggcactcttttgcaaatcgctacaaagcccgttggcgacagaccaacaattttcctcgagattatccagaggatcggctgcatgcttcaaaacgctgagggagagttgtaccagaagggtggctgcggaggtttcggcaagggaaatttcagcgagctcttcaagtcaattgaggagtacgagaagaccctggaggccaagcagaacactcaagtggctatcgcctga

SEQ ID NO: 129 - protein, 441 aa, Artificial Sequence
  SlHPPD Amino Acid Sequence (Solanum lycopersicum)
MGKQAAAAADDQQLPGDIEDKFKLVGFNHFVRTNPRSDFFTVKRFHHIEFWCGDATNTARRFSWGLGLPIAAISDLSTGNSVHASYLLRSSSSSQLQFLFTAPYSSAISTSSSASIPTFSVSSHRSFTATHGLGVRAIALEVENSRLAFSTCVAHGAKPVSEPVILNDEVVIAEVHLYGDVVLRFVSFLKDSNCFVFLPGFESVEGAQLDYGIRRLDHAVGNVPELGPVVEYIKSFTGFHEFAEFTAEDVGTAESGLNSVVLANNDETVLFPLNEPVYGTKRKSQIQTYLEHNEGAGVQHLALVTEDIFRTLREMRKRSGIGGFEFMPSPPPTYYKNLKTRAGDILSDEQIQECEELGILVDRDDQGTLLQIFTKPVGDRPTIFLEIIQRIGCMLKNEEGELYQKGGCGGFGKGNFSELFKSIEEYEKTLEAKQNTQVAIA

SEQ ID NO: 130 - DNA, 1326 bp, Artificial Sequence
  SlHPPD-01 Nucleotide Sequence (Solanum lycopersicum)
atgggcaaacaagccgctgccgccgccgatgaccaacaactccccggcgacattgaagataaattcaagctagtgggtttcaaccattttgtccgtactaatccccgttcagatttcttcactgttaaacgcttccatcacattgaattttggtgcggcgacgctaccaatactgctcgtcgcttttcatggggtctcggtttgccaattgctgctatatctgatctttctactggaaactccgtccatgcttcttatcttcttcgttcttcttcttcgtcccaacttcaattccttttcactgctccttattcctctgctatctctacctcttcttctgcatcaattccaactttctctgtttcttcccaccgatccttcacggctacccacgggctcggtgtgagagcaatagcattggaagttgaaaattcgcgtttggctttctcgacctgtgttgctcatggggcaaaacccgtttcggaaccagtcattttgaatgatgaagttgtgattgccgaagttcatctctacggcgacgtcgttttgcggtttgtgagttttctcaaagattcgaattgcttcgtttttcttccaggctttgaatcagttgagggagcccaacttgactatggtattcgccggctggaccacgctgtagggaatgtcccggagctgggtccggttgtagagtatatcaaaagctttactgggtttcatgaatttgcggagtttaccgctgaggatgttgggacagctgagagtgggctgaattctgtggtgttggcaaacaatgatgaaactgttttgtttccgctgaatgaaccggtgtatggcactaaaaggaagagtcaaattcagacgtatttggagcacaatgaaggggcaggggtgcagcatttagctttggtaactgaggatatatttagaactttgagggaaatgaggaaaaggagtggaattgggggatttgaattcatgccatcgcctcccccgacgtattataaaaatttgaaaaccagggcaggggatatactgagtgatgagcaaatacaggaatgtgaagaattggggatcttggtggatagggatgatcaggggactctgcttcagatattcacaaagcctgtaggggataggcctacaatttttctcgaaataattcagagaatagggtgcatgctgaaaaacgaggaaggagagctttatcagaagggtggatgtggaggcttcggaaagggaaatttctcagagctctttaaatccatcgaagaatatgaaaagacacttgaagctaaacaaaacactcaagtagcgattgcttga

SEQ ID NO: 131 - DNA, 1326 bp, Artificial Sequence
  SlHPPD-02 Nucleotide Sequence
atgggcaagcaagctgctgctgctgctgatgaccagcaactccctggagatattgaggacaagttcaagctggtgggtttcaaccacttcgttagaacaaatcccaggagcgatttcttcaccgtgaagaggttccaccatatcgagttctggtgcggagacgctaccaacactgccaggcgcttctcatggggcctcggactgcccattgctgccatctccgatctctctacaggtaatagcgttcatgcttcatacctcctgcgctcctctagctcatcccagctccaattcctgttcaccgctccctactctagcgccatttccacttcatcctctgctagcatcccaacattctcagtgagctcacacagatctttcacagccacccatggtttgggcgtgcgcgctattgccctcgaggttgagaactccagactggctttctctacctgcgttgctcacggcgccaagccagtgtccgagcctgttattctgaatgacgaggtggttatcgccgaggtgcatctctacggagatgtggttctgaggttcgttagcttccttaaggactcaaactgcttcgtgttccttccaggattcgagtccgttgagggtgctcagcttgattacggcattagaaggttggaccacgccgtgggaaatgttcccgagttgggtccagtggttgagtacatcaagtctttcactggcttccatgagttcgctgagttcactgccgaggatgtgggtacagctgagtccggccttaactctgtggttttggccaacaatgacgagacagtgcttttccctttgaatgagcccgtttacggaaccaagcgcaagagccagatccaaacttacctcgagcacaacgagggagctggtgtgcaacatcttgccttggttaccgaggatattttcaggactctgcgcgagatgcgcaagagaagcggtatcggcggattcgagttcatgccttcaccacctcccacttactacaagaatcttaagacaagagctggcgatattttgtcagacgagcagatccaagagtgcgaggagctcggtattctggtggatagggatgaccagggcacacttttgcaaatcttcaccaagccagttggcgacaggcctactattttcctcgagattatccagcgcatcggctgcatgctcaagaacgaggagggagagctgtaccaaaagggtggctgcggaggtttcggcaagggaaatttctccgagcttttcaagtctattgaggagtacgagaagaccttggaggccaagcagaacactcaagtggctatcgcctga

SEQ ID NO: 132 - protein, 441 aa, Artificial Sequence
  SlHPPDm-F372A Amino Acid Sequence
MGKQAAAAADDQQLPGDIEDKFKLVGFNHFVRTNPRSDFFTVKRFHHIEFWCGDATNTARRFSWGLGLPIAAISDLSTGNSVHASYLLRSSSSSQLQFLFTAPYSSAISTSSSASIPTFSVSSHRSFTATHGLGVRAIALEVENSRLAFSTCVAHGAKPVSEPVILNDEVVIAEVHLYGDVVLRFVSFLKDSNCFVFLPGFESVEGAQLDYGIRRLDHAVGNVPELGPVVEYIKSFTGFHEFAEFTAEDVGTAESGLNSVVLANNDETVLFPLNEPVYGTKRKSQIQTYLEHNEGAGVQHLALVTEDIFRTLREMRKRSGIGGFEFMPSPPPTYYKNLKTRAGDILSDEQIQECEELGILVDRDDQGTLLQIATKPVGDRPTIFLEIIQRIGCMLKNEEGELYQKGGCGGFGKGNFSELFKSIEEYEKTLEAKQNTQVAIA

SEQ ID NO: 133 - DNA, 1326 bp, Artificial Sequence
  SlHPPDm-F372A-01 Nucleotide Sequence
atgggcaaacaagccgctgccgccgccgatgaccaacaactccccggcgacattgaagataaattcaagctagtgggtttcaaccattttgtccgtactaatccccgttcagatttcttcactgttaaacgcttccatcacattgaattttggtgcggcgacgctaccaatactgctcgtcgcttttcatggggtctcggtttgccaattgctgctatatctgatctttctactggaaactccgtccatgcttcttatcttcttcgttcttcttcttcgtcccaacttcaattccttttcactgctccttattcctctgctatctctacctcttcttctgcatcaattccaactttctctgtttcttcccaccgatccttcacggctacccacgggctcggtgtgagagcaatagcattggaagttgaaaattcgcgtttggctttctcgacctgtgttgctcatggggcaaaacccgtttcggaaccagtcattttgaatgatgaagttgtgattgccgaagttcatctctacggcgacgtcgttttgcggtttgtgagttttctcaaagattcgaattgcttcgtttttcttccaggctttgaatcagttgagggagcccaacttgactatggtattcgccggctggaccacgctgtagggaatgtcccggagctgggtccggttgtagagtatatcaaaagctttactgggtttcatgaatttgcggagtttaccgctgaggatgttgggacagctgagagtgggctgaattctgtggtgttggcaaacaatgatgaaactgttttgtttccgctgaatgaaccggtgtatggcactaaaaggaagagtcaaattcagacgtatttggagcacaatgaaggggcaggggtgcagcatttagctttggtaactgaggatatatttagaactttgagggaaatgaggaaaaggagtggaattgggggatttgaattcatgccatcgcctcccccgacgtattataaaaatttgaaaaccagggcaggggatatactgagtgatgagcaaatacaggaatgtgaagaattggggatcttggtggatagggatgatcaggggactctgcttcagatagctacaaagcctgtaggggataggcctacaatttttctcgaaataattcagagaatagggtgcatgctgaaaaacgaggaaggagagctttatcagaagggtggatgtggaggcttcggaaagggaaatttctcagagctctttaaatccatcgaagaatatgaaaagacacttgaagctaaacaaaacactcaagtagcgattgcttga

SEQ ID NO: 134 - DNA, 1326 bp, Artificial Sequence
  SlHPPDm-F372A-02 Nucleotide Sequence
atgggcaagcaagctgctgctgctgctgatgaccagcaactccctggagatattgaggacaagttcaagctggtgggtttcaaccacttcgttagaacaaatcccaggagcgatttcttcaccgtgaagaggttccaccatatcgagttctggtgcggagacgctaccaacactgccaggcgcttctcatggggcctcggactgcccattgctgccatctccgatctctctacaggtaatagcgttcatgcttcatacctcctgcgctcctctagctcatcccagctccaattcctgttcaccgctccctactctagcgccatttccacttcatcctctgctagcatcccaacattctcagtgagctcacacagatctttcacagccacccatggtttgggcgtgcgcgctattgccctcgaggttgagaactccagactggctttctctacctgcgttgctcacggcgccaagccagtgtccgagcctgttattctgaatgacgaggtggttatcgccgaggtgcatctctacggagatgtggttctgaggttcgttagcttccttaaggactcaaactgcttcgtgttccttccaggattcgagtccgttgagggtgctcagcttgattacggcattagaaggttggaccacgccgtgggaaatgttcccgagttgggtccagtggttgagtacatcaagtctttcactggcttccatgagttcgctgagttcactgccgaggatgtgggtacagctgagtccggccttaactctgtggttttggccaacaatgacgagacagtgcttttccctttgaatgagcccgtttacggaaccaagcgcaagagccagatccaaacttacctcgagcacaacgagggagctggtgtgcaacatcttgccttggttaccgaggatattttcaggactctgcgcgagatgcgcaagagaagcggtatcggcggattcgagttcatgccttcaccacctcccacttactacaagaatcttaagacaagagctggcgatattttgtcagacgagcagatccaagagtgcgaggagctcggtattctggtggatagggatgaccagggcacacttttgcaaatcgctaccaagccagttggcgacaggcctactattttcctcgagattatccagcgcatcggctgcatgctcaagaacgaggagggagagctgtaccaaaagggtggctgcggaggtttcggcaagggaaatttctccgagcttttcaagtctattgaggagtacgagaagaccttggaggccaagcagaacactcaagtggctatcgcctga

SEQ ID NO: 135 - protein, 504 aa, Arachis hypogaea
  AhHPPD Amino Acid Sequence
MATAYTYAHAVTYCNSQHNPPIIPILSTNQHPPRVTLPSSIPHFISTITTFNLKHFPSHSLHTVMVTQTQQNAPSSSPELGFKLVGFKNFVRTNPKSDRFKVIRFHHVEFWCTDATNTASRFSWGLGMPIVAKSDLSTGNAVHASYLLRSGDLNFLFSAPYSASIAGDGASASFPSFSASDCHSFAAKHGLAVRAVAIEVEDASAAFSASVANGAKPVSPAVLLDNSVGFAEVHLYGDVVLRYISYSAPTRESNLNPTLRFLPGFEAVEADSSFPELDYGIRRLDHAVGNVPELAPAVNYLKKFTGFHEFAEFTAEDVGTSESGLNSVVLASNDEMVLLPLNEPVYGTKRKSQIETYLEHNEGAGLQHLALVSEDIFRTLREMRKRSTIGGFQFMPSPPPTYYRNLKKRAGDVLSDEQIKECEELGILVDRDDQGTLLQIFTKPVGDRPTIFIEIIQRIGCMLKDEEGKVYQKGGCGGFGKGNFSELFKSIEEYEKTLESRRTA

SEQ ID NO: 136 - DNA, 1515 bp, Arachis hypogaea
  AhHPPD-01 Nucleotide Sequence
atggctacagcatatacatatgcacatgccgtaacatattgcaactcgcaacacaacccgcccataattcccatcctctcaaccaaccaacaccctccacgtgtcacccttccctcctcaatcccacactttattagcaccattaccaccttcaacttgaagcactttccatcacattccctccacacagtcatggttacccaaacgcaacaaaacgctccctcgtcttcccccgaactgggttttaagctggttggattcaaaaacttcgtccgaaccaacccgaaatcggaccgcttcaaggtaatccggttccaccatgtggagttctggtgcaccgatgcaaccaacaccgccagccgcttctcttggggcctcggaatgccgatcgtagcgaaatccgacctctccaccggaaacgcagttcatgcctcctacctcctccgctccggcgacctcaatttcctcttctccgctccttattccgcctcaatcgccggcgatggtgcctccgcttcctttccctccttctctgcctctgattgccactccttcgcagctaaacacggcctcgccgtccgcgccgtcgccatcgaggtggaagacgcctccgccgccttctccgccagcgtcgccaacggcgcgaaacctgtatctccggcggttctcctcgacaacagcgtcggattcgccgaggttcatctctacggcgacgtcgttctccgctacatcagctactccgccccgacccgagaatcaaacctgaatcctaccttacggttcctccctggattcgaagccgtggaggctgattcgtcgttcccggagctagattacggtattcggcgactcgaccacgccgtcgggaacgtgccggagctggcgccggcagtgaattacttgaagaaattcaccggattccacgagttcgctgagttcacggcggaggacgttggaacgagtgagtcagggctgaactcggtggttcttgcgagcaacgatgagatggttcttcttccgttgaacgaaccggtgtacggaacaaagaggaagagccagattgagacgtacctggagcacaacgaaggtgcagggttgcagcacttggcgttggtctccgaagacatattcaggactctgagggagatgaggaagagaagcaccatcggcggttttcagttcatgccgtctccgccgccaacgtattaccggaacttgaagaagcgtgccggtgatgtgctgagtgatgaacagattaaggagtgtgaggagcttggaattcttgttgatagggacgatcagggcactctgcttcagattttcaccaaacctgttggtgataggccaaccatttttatagagataattcagagaattggatgcatgctcaaggatgaagaaggaaaggtgtaccaaaaaggtggatgtgggggttttggaaaaggcaacttctctgagctttttaaatccattgaagaatatgagaagactttggaaagtagaagaactgcataa

SEQ ID NO: 137 - DNA, 1515 bp, Artificial Sequence
  AhHPPD-02 Nucleotide Sequence
atggccaccgcttacacttacgcccacgctgttacttactgcaactcccagcataatccacctattatccctattctttctacaaaccaacacccaccaagggtgaccttgccatcctctatccctcatttcattagcactatcaccactttcaaccttaagcacttcccctcacactccttgcatacagtgatggttacacagacccagcaaaatgctcccagctcatccccagagctcggtttcaagctggtgggcttcaagaacttcgttagaaccaatcctaagtcagacaggttcaaggttattaggttccaccatgttgagttctggtgcactgatgctactaacacagccagcagattctcatggggcctcggaatgccaatcgtggccaagtccgacctgtctactggtaacgccgttcatgctagctacctcctgagatcaggcgatcttaatttcttgttctccgctccatactctgccagcattgctggtgacggcgcctcagcttccttcccttctttcagcgcctcagattgccacagcttcgccgctaagcatggactggctgtgagggccgttgctatcgaggtggaggacgcctcagccgctttctccgcctctgttgctaacggtgccaagcctgtgtcccccgctgttcttttggacaattctgtgggcttcgccgaggttcacctctacggagatgtggttctgaggtacattagctactcagctcccactcgcgagtctaacctcaatcctacactcagattcctgcctggattcgaggctgtggaggctgattctagcttcccagagcttgactacggaatcaggcgcttggatcatgccgtgggtaacgttcctgagctcgcccccgctgttaattacctgaagaagttcaccggcttccacgagttcgctgagttcacagccgaggacgtgggaacctccgagtctggtcttaactccgtggttttggcttctaatgatgagatggtgctcctgccacttaacgagcctgtttacggcaccaagaggaagtcccagattgagacttacctcgagcacaatgagggagctggtctgcaacatctcgccctggtttctgaggacattttcaggacattgcgcgagatgcgcaagagaagcaccatcggcggattccagttcatgccttcacctcccccaacatactaccgcaaccttaagaagagagccggcgatgtgttgagcgacgagcaaattaaggagtgcgaggagcttggcatcttggttgaccgcgatgaccagggaactcttttgcaaattttcacaaagcccgtgggagataggccaaccattttcatcgagattatccagcgcatcggttgcatgctcaaggatgaggagggcaaggtgtaccaaaagggtggctgcggaggtttcggcaagggaaatttcagcgagctcttcaagtcaatcgaggagtacgagaagaccctggagtctagaaggactgcctga

SEQ ID NO: 138 - protein, 504 aa, Artificial Sequence
  AhHPPDm-F372A Amino Acid Sequence
MATAYTYAHAVTYCNSQHNPPIIPILSTNQHPPRVTLPSSIPHFISTITTFNLKHFPSHSLHTVMVTQTQQNAPSSSPELGFKLVGFKNFVRTNPKSDRFKVIRFHHVEFWCTDATNTASRFSWGLGMPIVAKSDLSTGNAVHASYLLRSGDLNFLFSAPYSASIAGDGASASFPSFSASDCHSFAAKHGLAVRAVAIEVEDASAAFSASVANGAKPVSPAVLLDNSVGFAEVHLYGDVVLRYISYSAPTRESNLNPTLRFLPGFEAVEADSSFPELDYGIRRLDHAVGNVPELAPAVNYLKKFTGFHEFAEFTAEDVGTSESGLNSVVLASNDEMVLLPLNEPVYGTKRKSQIETYLEHNEGAGLQHLALVSEDIFRTLREMRKRSTIGGFQFMPSPPPTYYRNLKKRAGDVLSDEQIKECEELGILVDRDDQGTLLQIATKPVGDRPTIFIEIIQRIGCMLKDEEGKVYQKGGCGGFGKGNFSELFKSIEEYEKTLESRRTA

SEQ ID NO: 139 - DNA, 1515 bp, Artificial Sequence
  AhHPPDm-F372A-01 Nucleotide Sequence
atggctacagcatatacatatgcacatgccgtaacatattgcaactcgcaacacaacccgcccataattcccatcctctcaaccaaccaacaccctccacgtgtcacccttccctcctcaatcccacactttattagcaccattaccaccttcaacttgaagcactttccatcacattccctccacacagtcatggttacccaaacgcaacaaaacgctccctcgtcttcccccgaactgggttttaagctggttggattcaaaaacttcgtccgaaccaacccgaaatcggaccgcttcaaggtaatccggttccaccatgtggagttctggtgcaccgatgcaaccaacaccgccagccgcttctcttggggcctcggaatgccgatcgtagcgaaatccgacctctccaccggaaacgcagttcatgcctcctacctcctccgctccggcgacctcaatttcctcttctccgctccttattccgcctcaatcgccggcgatggtgcctccgcttcctttccctccttctctgcctctgattgccactccttcgcagctaaacacggcctcgccgtccgcgccgtcgccatcgaggtggaagacgcctccgccgccttctccgccagcgtcgccaacggcgcgaaacctgtatctccggcggttctcctcgacaacagcgtcggattcgccgaggttcatctctacggcgacgtcgttctccgctacatcagctactccgccccgacccgagaatcaaacctgaatcctaccttacggttcctccctggattcgaagccgtggaggctgattcgtcgttcccggagctagattacggtattcggcgactcgaccacgccgtcgggaacgtgccggagctggcgccggcagtgaattacttgaagaaattcaccggattccacgagttcgctgagttcacggcggaggacgttggaacgagtgagtcagggctgaactcggtggttcttgcgagcaacgatgagatggttcttcttccgttgaacgaaccggtgtacggaacaaagaggaagagccagattgagacgtacctggagcacaacgaaggtgcagggttgcagcacttggcgttggtctccgaagacatattcaggactctgagggagatgaggaagagaagcaccatcggcggttttcagttcatgccgtctccgccgccaacgtattaccggaacttgaagaagcgtgccggtgatgtgctgagtgatgaacagattaaggagtgtgaggagcttggaattcttgttgatagggacgatcagggcactctgcttcagattgctaccaaacctgttggtgataggccaaccatttttatagagataattcagagaattggatgcatgctcaaggatgaagaaggaaaggtgtaccaaaaaggtggatgtgggggttttggaaaaggcaacttctctgagctttttaaatccattgaagaatatgagaagactttggaaagtagaagaactgcataa

SEQ ID NO: 140 - DNA, 1515 bp, Artificial Sequence
  AhHPPDm-F372A-02 Nucleotide Sequence
atggccaccgcttacacttacgcccacgctgttacttactgcaactcccagcataatccacctattatccctattctttctacaaaccaacacccaccaagggtgaccttgccatcctctatccctcatttcattagcactatcaccactttcaaccttaagcacttcccctcacactccttgcatacagtgatggttacacagacccagcaaaatgctcccagctcatccccagagctcggtttcaagctggtgggcttcaagaacttcgttagaaccaatcctaagtcagacaggttcaaggttattaggttccaccatgttgagttctggtgcactgatgctactaacacagccagcagattctcatggggcctcggaatgccaatcgtggccaagtccgacctgtctactggtaacgccgttcatgctagctacctcctgagatcaggcgatcttaatttcttgttctccgctccatactctgccagcattgctggtgacggcgcctcagcttccttcccttctttcagcgcctcagattgccacagcttcgccgctaagcatggactggctgtgagggccgttgctatcgaggtggaggacgcctcagccgctttctccgcctctgttgctaacggtgccaagcctgtgtcccccgctgttcttttggacaattctgtgggcttcgccgaggttcacctctacggagatgtggttctgaggtacattagctactcagctcccactcgcgagtctaacctcaatcctacactcagattcctgcctggattcgaggctgtggaggctgattctagcttcccagagcttgactacggaatcaggcgcttggatcatgccgtgggtaacgttcctgagctcgcccccgctgttaattacctgaagaagttcaccggcttccacgagttcgctgagttcacagccgaggacgtgggaacctccgagtctggtcttaactccgtggttttggcttctaatgatgagatggtgctcctgccacttaacgagcctgtttacggcaccaagaggaagtcccagattgagacttacctcgagcacaatgagggagctggtctgcaacatctcgccctggtttctgaggacattttcaggacattgcgcgagatgcgcaagagaagcaccatcggcggattccagttcatgccttcacctcccccaacatactaccgcaaccttaagaagagagccggcgatgtgttgagcgacgagcaaattaaggagtgcgaggagcttggcatcttggttgaccgcgatgaccagggaactcttttgcaaattgctacaaagcccgtgggagataggccaaccattttcatcgagattatccagcgcatcggttgcatgctcaaggatgaggagggcaaggtgtaccaaaagggtggctgcggaggtttcggcaagggaaatttcagcgagctcttcaagtcaatcgaggagtacgagaagaccctggagtctagaaggactgcctga

SEQ ID NO: 141 - protein, 339 aa, Artificial Sequence
  CyHPPD Amino Acid Sequence (Cyanobacteria)
MEFDYLHLYVDDYQSAHRCYQRQWGFTCVNKIITDQGITGIYQQGQILLLISASESSLSRYADYLQKHPPGVGEVAWQVANWQKIQHQLSELQIETTPVIHPLTKAEGLTFLLWGDVHHSIYPVRSELNQNKTLHGVGLTTIDHVVLNIAADQFTQASQWYQQVFGWSVQQSFTVNTPHSGLYSEALASANGKVQFNLNCPTNNSSQIQTFLANNHGAGIQHVAFSTTSITRTVAHLRERGVNFLKIPTGYYQQQRNSSYFNYASLDWDTLQCLEILLDDQDNTGERLLLQIFSQPCYGVGTLFWEIIERRHRAKGFGQGNFQALYEAVETLEKQLEVP

SEQ ID NO: 142 - DNA, 1020 bp, Artificial Sequence
  CyHPPD-01 Nucleotide Sequence (Cyanobacteria)
atggaattcgactatcttcatttatacgttgacgattatcagtcagctcatcgttgttatcaacgtcaatggggtttcacttgcgtaaataaaattattactgaccaaggaattactggcatctaccaacaggggcaaatacttctgctaatttcggcatcggaatctagtttgagtagatatgccgactatctccagaaacatccccccggcgtaggtgaagtcgcttggcaggtggccaattggcaaaaaattcagcatcaattatcagaattacagatagaaaccacaccagttattcatcctctgactaaagcagaaggattaacttttttgctctggggagatgtgcaccatagcatttatcctgttcgttctgagctaaatcagaataaaacattgcatggtgttggtttaacgaccatcgaccatgtggtgctaaacattgccgccgatcaatttacccaggcttcccaatggtatcaacaggtgtttggctggtcggtgcagcagagttttactgtcaatacgccccattctggtctgtatagcgaagccctggccagtgccaatgggaaagtccaatttaacctcaattgtcccaccaataacagttcccaaattcaaacttttttagccaataaccatggggctggtattcaacatgtcgctttttccactacgagtattacgcgaactgtggctcatctgcgggaaaggggcgtaaattttttaaaaatccccactggctattatcaacagcaaagaaacagtagctattttaattatgcaagtttggattgggataccttacagtgcctagaaattttgctggatgatcaagataatacgggggagcgattactgctacaaatttttagtcagccttgctatggagtaggcactctattttgggaaattattgaacgccgccaccgggcaaaaggatttggtcaaggaaactttcaagctctctatgaagcggtggagactttagaaaaacagttagaagtgccataa

SEQ ID NO: 143 - DNA, 1020 bp, Artificial Sequence
  CyHPPD-02 Nucleotide Sequence
atggagttcgattaccttcacctctacgtggatgactaccagtccgctcatcgctgctaccaaagacagtggggattcacttgcgttaacaagattatcactgatcagggtattacaggcatctaccagcaaggtcaaattctcctgcttatcagcgcttcagagtcctctctcagccgctacgccgactacctgcagaagcacccacctggcgtgggagaggttgcttggcaggtggccaattggcaaaagattcaacaccagctctcagagctgcaaattgagaccactcccgttatccatccacttaccaaggctgagggattgactttcttgctctggggtgacgtgcaccatagcatctaccccgttaggtctgagcttaaccagaataagacccttcacggtgtgggcttgacaaccattgatcatgtggttttgaacatcgccgctgaccaattcactcaggcctcccaatggtaccagcaagtgttcggatggagcgttcagcaatcattcacagtgaacacccctcactccggtctctactctgaggccctggcttctgccaatggcaaggttcagttcaacctcaattgccccacaaacaatagctcacaaattcagaccttcctggctaacaatcacggagccggtattcaacatgtggctttctccactacatctatcaccaggactgtggcccatcttagagagaggggcgttaatttcttgaagatccctaccggatactaccagcaacagcgcaactcctcttacttcaattacgcttccctcgattgggacactcttcagtgcttggagattctgcttgatgaccaagataacacaggcgagagattgctcctgcagatcttctctcaaccatgctacggcgttggaacacttttctgggagattatcgagaggcgccatagggccaagggtttcggccagggaaatttccaagctctgtacgaggccgtggagaccctcgagaagcagctggaggttccttga

SEQ ID NO: 144 - protein, 339 aa, Artificial Sequence
  CyHPPDm-F372A Amino Acid Sequence
MEFDYLHLYVDDYQSAHRCYQRQWGFTCVNKIITDQGITGIYQQGQILLLISASESSLSRYADYLQKHPPGVGEVAWQVANWQKIQHQLSELQIETTPVIHPLTKAEGLTFLLWGDVHHSIYPVRSELNQNKTLHGVGLTTIDHVVLNIAADQFTQASQWYQQVFGWSVQQSFTVNTPHSGLYSEALASANGKVQFNLNCPTNNSSQIQTFLANNHGAGIQHVAFSTTSITRTVAHLRERGVNFLKIPTGYYQQQRNSSYFNYASLDWDTLQCLEILLDDQDNTGERLLLQIASQPCYGVGTLFWEIIERRHRAKGFGQGNFQALYEAVETLEKQLEVP

SEQ ID NO: 145 - DNA, 1020 bp, Artificial Sequence
  CyHPPDm-F372A-01 Nucleotide Sequence
atggaattcgactatcttcatttatacgttgacgattatcagtcagctcatcgttgttatcaacgtcaatggggtttcacttgcgtaaataaaattattactgaccaaggaattactggcatctaccaacaggggcaaatacttctgctaatttcggcatcggaatctagtttgagtagatatgccgactatctccagaaacatccccccggcgtaggtgaagtcgcttggcaggtggccaattggcaaaaaattcagcatcaattatcagaattacagatagaaaccacaccagttattcatcctctgactaaagcagaaggattaacttttttgctctggggagatgtgcaccatagcatttatcctgttcgttctgagctaaatcagaataaaacattgcatggtgttggtttaacgaccatcgaccatgtggtgctaaacattgccgccgatcaatttacccaggcttcccaatggtatcaacaggtgtttggctggtcggtgcagcagagttttactgtcaatacgccccattctggtctgtatagcgaagccctggccagtgccaatgggaaagtccaatttaacctcaattgtcccaccaataacagttcccaaattcaaacttttttagccaataaccatggggctggtattcaacatgtcgctttttccactacgagtattacgcgaactgtggctcatctgcgggaaaggggcgtaaattttttaaaaatccccactggctattatcaacagcaaagaaacagtagctattttaattatgcaagtttggattgggataccttacagtgcctagaaattttgctggatgatcaagataatacgggggagcgattactgctacaaattgctagtcagccttgctatggagtaggcactctattttgggaaattattgaacgccgccaccgggcaaaaggatttggtcaaggaaactttcaagctctctatgaagcggtggagactttagaaaaacagttagaagtgccataa

SEQ ID NO: 146 - DNA, 1020 bp, Artificial Sequence
  CyHPPDm-F372A-02 Nucleotide Sequence
atggagttcgattaccttcacctctacgtggatgactaccagtccgctcatcgctgctaccaaagacagtggggattcacttgcgttaacaagattatcactgatcagggtattacaggcatctaccagcaaggtcaaattctcctgcttatcagcgcttcagagtcctctctcagccgctacgccgactacctgcagaagcacccacctggcgtgggagaggttgcttggcaggtggccaattggcaaaagattcaacaccagctctcagagctgcaaattgagaccactcccgttatccatccacttaccaaggctgagggattgactttcttgctctggggtgacgtgcaccatagcatctaccccgttaggtctgagcttaaccagaataagacccttcacggtgtgggcttgacaaccattgatcatgtggttttgaacatcgccgctgaccaattcactcaggcctcccaatggtaccagcaagtgttcggatggagcgttcagcaatcattcacagtgaacacccctcactccggtctctactctgaggccctggcttctgccaatggcaaggttcagttcaacctcaattgccccacaaacaatagctcacaaattcagaccttcctggctaacaatcacggagccggtattcaacatgtggctttctccactacatctatcaccaggactgtggcccatcttagagagaggggcgttaatttcttgaagatccctaccggatactaccagcaacagcgcaactcctcttacttcaattacgcttccctcgattgggacactcttcagtgcttggagattctgcttgatgaccaagataacacaggcgagagattgctcctgcagatcgcttctcaaccatgctacggcgttggaacacttttctgggagattatcgagaggcgccatagggccaagggtttcggccagggaaatttccaagctctgtacgaggccgtggagaccctcgagaagcagctggaggttccttga

SEQ ID NO: 147 - protein, 350 aa, Artificial Sequence
  N1HPPD Amino Acid Sequence (Sphingobacterium)
MAADSENPLGLHGFAFAEFTSPDPAAMARQFEQLGFVPAARRKDRGLTLYRQGRIAFILNAGEGEQASAFRAAHGPSANGMAFNVADAKAAHRHAIQSGATDADTAQSALPGTYAIEGIGDSLLYLVDSDPFADWDEVPGWREASAERGVGLDLLDHLTHNVRRGQMRVWSEFYATLFGFEEQKFFDIKGQATGLFSQAMIAPDHEIRIPLNESQDDNSQIEEFIREYNGEGIQHLALTTPDIYSTVEKLRANGVRLQDTIDTYYDLVDERVPGHGEDLARLRKNRILIDGDVHDEGLLLQIFTETMFGPIFFEIIQRKGNEGFGNGNFQVLYESIELDQIRRGVVTVDA

SEQ ID NO: 148 - DNA, 1053 bp, Artificial Sequence
  N1HPPD-01 Nucleotide Sequence (Sphingobacterium)
atggccgccgattccgaaaatccgttgggcctgcatggctttgcgtttgctgaatttacctcacccgatccggccgcgatggcgcggcagttcgagcagcttggatttgttccggcggcgcgccggaaggacagggggctgacgctttaccggcaggggcgcatcgcgttcattctgaatgccggggagggcgaacaggccagcgcgtttcgcgccgcccatggcccatccgccaacggcatggcgtttaacgtcgccgacgcgaaagcagcgcaccggcacgccattcaaagtggggcgacagacgctgataccgcgcagagcgctctgccggggacttatgccattgagggcataggcgactcgctgctctatctggtggacagcgacccctttgcggactgggatgaggtgcccggttggcgagaggcgtcggcggagcggggcgtcggcctcgacctgctcgaccacctgacccataatgtccgccgggggcagatgcgcgtatggtccgaattctacgcgacgctgttcggtttcgaggaacagaagttcttcgacatcaaagggcaggcgaccggtctgttcagccaggcgatgatcgccccggatcatgaaatccgcatccctctgaatgaaagccaggatgataacagccagatcgaggagtttatccgcgaatataatggcgagggtatccagcatctcgccctgacgacgccggatatctattccacggtggagaagctacgcgccaatggcgtgcggctgcaggatacgatcgacacctattatgatctggtcgacgagcgggtgccggggcatggcgaggatctggcgcgattgcgcaaaaaccgcatcctgatcgatggcgatgtccatgatgaggggctgctgctgcagatattcaccgagactatgttcggcccgatcttcttcgagatcatccagcgcaagggcaatgagggtttcgggaacggcaatttccaggtactctacgaatccatagaattggaccagatccggcgcggcgttgtgacggtcgatgcctga

SEQ ID NO: 149 - DNA, 1053 bp, Artificial Sequence
  N1HPPD-02 Nucleotide Sequence
atggctgcagattctgagaacccattgggtcttcatggatttgctttcgcagagtttacttctccagatccagctgcaatggctagacaatttgagcagttgggtttcgttcctgctgcaagaaggaaggataggggtttgactctttatagacaaggaaggattgcttttattcttaatgcaggagagggtgaacaggcttctgcattcagagctgcacacggtccatcagctaacggaatggcttttaacgtggctgatgcaaaggctgcacataggcacgctattcaatctggtgctactgatgcagatacagctcagtcagcattgcctggaacatatgctattgagggaattggagattctcttttgtaccttgttgattcagatccattcgcagattgggatgaagtgcctggatggagagaggcttctgcagaaaggggagttggtttggatcttttggatcatcttacccacaacgttagaaggggtcaaatgagagtgtggtcagagttctacgctactttgtttggattcgaggaacagaagtttttcgatattaagggtcaagcaacaggattgttttctcaggctatgattgcaccagatcatgagattaggattccacttaacgaatctcaagatgataactcacagatcgaggagtttattagggagtataacggagaaggtattcaacacttggctcttactacaccagatatctattcaacagttgaaaagttgagagcaaatggtgtgaggcttcaagatacaatcgatacctattacgatttggttgatgagagagtgcctggacatggtgaagatttggctagacttaggaagaacaggattcttattgatggagatgttcacgatgagggacttttgcttcaaatttttaccgaaactatgttcggtccaattttctttgagattattcagaggaagggaaacgagggatttggtaacggaaacttccaagttttgtacgagtctatcgaacttgatcagattagaaggggagttgtgaccgtggatgcttga

SEQ ID NO: 150 - protein, 350 aa, Artificial Sequence
  N1HPPDm-F372A Amino Acid Sequence
MAADSENPLGLHGFAFAEFTSPDPAAMARQFEQLGFVPAARRKDRGLTLYRQGRIAFILNAGEGEQASAFRAAHGPSANGMAFNVADAKAAHRHAIQSGATDADTAQSALPGTYAIEGIGDSLLYLVDSDPFADWDEVPGWREASAERGVGLDLLDHLTHNVRRGQMRVWSEFYATLFGFEEQKFFDIKGQATGLFSQAMIAPDHEIRIPLNESQDDNSQIEEFIREYNGEGIQHLALTTPDIYSTVEKLRANGVRLQDTIDTYYDLVDERVPGHGEDLARLRKNRILIDGDVHDEGLLLQIATETMFGPIFFEIIQRKGNEGFGNGNFQVLYESIELDQIRRGVVTVDA

SEQ ID NO: 151 - DNA, 1053 bp, Artificial Sequence
  N1HPPDm-F372A-01 Nucleotide Sequence
atggccgccgattccgaaaatccgttgggcctgcatggctttgcgtttgctgaatttacctcacccgatccggccgcgatggcgcggcagttcgagcagcttggatttgttccggcggcgcgccggaaggacagggggctgacgctttaccggcaggggcgcatcgcgttcattctgaatgccggggagggcgaacaggccagcgcgtttcgcgccgcccatggcccatccgccaacggcatggcgtttaacgtcgccgacgcgaaagcagcgcaccggcacgccattcaaagtggggcgacagacgctgataccgcgcagagcgctctgccggggacttatgccattgagggcataggcgactcgctgctctatctggtggacagcgacccctttgcggactgggatgaggtgcccggttggcgagaggcgtcggcggagcggggcgtcggcctcgacctgctcgaccacctgacccataatgtccgccgggggcagatgcgcgtatggtccgaattctacgcgacgctgttcggtttcgaggaacagaagttcttcgacatcaaagggcaggcgaccggtctgttcagccaggcgatgatcgccccggatcatgaaatccgcatccctctgaatgaaagccaggatgataacagccagatcgaggagtttatccgcgaatataatggcgagggtatccagcatctcgccctgacgacgccggatatctattccacggtggagaagctacgcgccaatggcgtgcggctgcaggatacgatcgacacctattatgatctggtcgacgagcgggtgccggggcatggcgaggatctggcgcgattgcgcaaaaaccgcatcctgatcgatggcgatgtccatgatgaggggctgctgctgcagatagctaccgagactatgttcggcccgatcttcttcgagatcatccagcgcaagggcaatgagggtttcgggaacggcaatttccaggtactctacgaatccatagaattggaccagatccggcgcggcgttgtgacggtcgatgcctga

SEQ ID NO: 152 - DNA, 1053 bp, Artificial Sequence
  N1HPPDm-F372A-02 Nucleotide Sequence
atggctgcagattctgagaacccattgggtcttcatggatttgctttcgcagagtttacttctccagatccagctgcaatggctagacaatttgagcagttgggtttcgttcctgctgcaagaaggaaggataggggtttgactctttatagacaaggaaggattgcttttattcttaatgcaggagagggtgaacaggcttctgcattcagagctgcacacggtccatcagctaacggaatggcttttaacgtggctgatgcaaaggctgcacataggcacgctattcaatctggtgctactgatgcagatacagctcagtcagcattgcctggaacatatgctattgagggaattggagattctcttttgtaccttgttgattcagatccattcgcagattgggatgaagtgcctggatggagagaggcttctgcagaaaggggagttggtttggatcttttggatcatcttacccacaacgttagaaggggtcaaatgagagtgtggtcagagttctacgctactttgtttggattcgaggaacagaagtttttcgatattaagggtcaagcaacaggattgttttctcaggctatgattgcaccagatcatgagattaggattccacttaacgaatctcaagatgataactcacagatcgaggagtttattagggagtataacggagaaggtattcaacacttggctcttactacaccagatatctattcaacagttgaaaagttgagagcaaatggtgtgaggcttcaagatacaatcgatacctattacgatttggttgatgagagagtgcctggacatggtgaagatttggctagacttaggaagaacaggattcttattgatggagatgttcacgatgagggacttttgcttcaaattgctaccgaaactatgttcggtccaattttctttgagattattcagaggaagggaaacgagggatttggtaacggaaacttccaagttttgtacgagtctatcgaacttgatcagattagaaggggagttgtgaccgtggatgcttga

SEQ ID NO: 153 - protein, 363 aa, Artificial Sequence
  N2HPPD Amino Acid Sequence (Sphingobacterium)
MTLFDNPLGLDGFEFVEFSAPAKGMLEPVFAAMGFVMIARHRSKDVQLWRQGGINLIANYEPRSPAAYFAAEHGPSACGMGWRVRNAAKAYELAVERGAEPVDVKTGPMELRLPAIRGIGGSIIYLIDRYEDEDGGLSIYDIDFVYEPGVDRHPEGAGFKIIDHLTHNVYGGRMAHWASFYERVFGFREIRYFDIKGEYTGLTSKAMTAPDGKIRIPLNEEGKAGGGQIEEFLRAYNGEGIQHIAFLCDDLIAAWDKLKALGTPLMTAPPATYYEMLDERLPGHGEPVAELQKRGILLDGSTQQGDPRLLLQIFGQATIGPVFFEFIQRKKDEGFGEGNFTALFESMERDQLRRGTLNAGESA

SEQ ID NO: 154 - DNA, 1092 bp, Artificial Sequence
  N2HPPD-01 Nucleotide Sequence (Sphingobacterium)
atgaccctgttcgacaatcccctcggcctcgacggtttcgaatttgtcgaattcagcgcgcccgccaaaggcatgcttgaaccggtgttcgccgccatgggcttcgtcatgatcgcccggcaccggtcgaaggacgtgcaactgtggcggcagggcggcatcaacctgatcgccaattacgagccgcgcagccctgccgcctatttcgctgccgaacatggtccatcggcctgcggcatgggctggcgcgtgcgcaacgcggccaaggcttatgaactggcggtcgaacgaggcgccgagccggtggatgtcaagaccggccccatggaattgcgcctgcctgctatccgcggcatcggcggatcgatcatctatctcatcgaccgctacgaagatgaggatggcggcctgtccatctatgatatcgacttcgtatacgagccgggcgtcgaccggcaccccgaaggcgcgggtttcaagataatcgatcatctgacccacaatgtctatggcggccgcatggcccattgggcgagcttctacgagcgcgtcttcggcttccgcgagattcgctatttcgacatcaagggggaatataccggcctcaccagcaaggcgatgaccgcgcccgacggcaagatccgtatccccttgaacgaagagggcaaggctggcggcggccagatcgaagaattcctgcgcgcctataatggcgaaggcatccagcatatcgccttcctgtgcgacgacctcatcgccgcgtgggacaagctcaaggcgctgggcacccctttgatgaccgcaccgcccgccacctattatgagatgcttgacgaacgcctgcccggtcatggcgagccggtcgcggaattgcagaagcgcggtatcctgctagacggttcgacgcagcagggcgatcctcgcttgctgctccagatcttcgggcaagccacaatcgggccggtcttcttcgaattcattcaacgcaagaaggatgaagggttcggcgaaggaaacttcaccgccctgttcgagagcatggagcgcgaccaactgcgccgtggcaccttgaatgcaggggagtcggcgtga

SEQ ID NO: 155 - DNA, 1092 bp, Artificial Sequence
  N2HPPD-02 Nucleotide Sequence
atgacattgtttgataacccattgggacttgatggttttgagttcgttgagttttctgctccagcaaagggtatgcttgaacctgtttttgctgcaatgggattcgtgatgattgctagacataggtcaaaggatgtgcaattgtggagacagggaggtattaaccttatcgcaaactacgaaccaagatctccagctgcatactttgctgcagagcacggtccatcagcttgtggtatgggatggagagttaggaatgctgcaaaggcttatgagttggcagtggaaaggggtgctgagcctgttgatgtgaagaccggacctatggagcttagacttcctgcaattaggggtattggaggatctattatctatcttatcgatagatacgaggatgaagatggaggtctttcaatctatgatatcgatttcgtttacgaaccaggagtggatagacatcctgagggtgctggattcaagattattgatcatttgacccacaacgtttatggaggtagaatggctcactgggcatctttttacgaaagggtgtttggtttcagagagatcaggtacttcgatattaagggagaatacactggtcttacatcaaaggctatgactgcaccagatggaaagattaggattccattgaacgaggaaggaaaggctggaggtggacaaattgaggaatttcttagagcttacaatggtgaaggtattcaacatattgcattcttgtgcgatgatcttattgctgcatgggataagttgaaggcacttggaacccctttgatgactgctccacctgcaacttattacgaaatgttggatgagagacttccaggtcacggagaacctgttgctgagcttcaaaagaggggaattttgttggatggttctactcaacagggagatccaagacttttgcttcaaattttcggtcaggcaacaattggacctgtgtttttcgagtttattcaaaggaagaaggatgaaggtttcggagagggtaactttacagctcttttcgagtctatggaaagagatcagttgagaaggggaactcttaatgctggagagtcagcatga

SEQ ID NO: 156 - protein, 363 aa, Artificial Sequence
  N2HPPDm-F372A Amino Acid Sequence
MTLFDNPLGLDGFEFVEFSAPAKGMLEPVFAAMGFVMIARHRSKDVQLWRQGGINLIANYEPRSPAAYFAAEHGPSACGMGWRVRNAAKAYELAVERGAEPVDVKTGPMELRLPAIRGIGGSIIYLIDRYEDEDGGLSIYDIDFVYEPGVDRHPEGAGFKIIDHLTHNVYGGRMAHWASFYERVFGFREIRYFDIKGEYTGLTSKAMTAPDGKIRIPLNEEGKAGGGQIEEFLRAYNGEGIQHIAFLCDDLIAAWDKLKALGTPLMTAPPATYYEMLDERLPGHGEPVAELQKRGILLDGSTQQGDPRLLLQIAGQATIGPVFFEFIQRKKDEGFGEGNFTALFESMERDQLRRGTLNAGESA

SEQ ID NO: 157 - DNA, 1092 bp, Artificial Sequence
  N2HPPDm-F372A-01 Nucleotide Sequence
atgaccctgttcgacaatcccctcggcctcgacggtttcgaatttgtcgaattcagcgcgcccgccaaaggcatgcttgaaccggtgttcgccgccatgggcttcgtcatgatcgcccggcaccggtcgaaggacgtgcaactgtggcggcagggcggcatcaacctgatcgccaattacgagccgcgcagccctgccgcctatttcgctgccgaacatggtccatcggcctgcggcatgggctggcgcgtgcgcaacgcggccaaggcttatgaactggcggtcgaacgaggcgccgagccggtggatgtcaagaccggccccatggaattgcgcctgcctgctatccgcggcatcggcggatcgatcatctatctcatcgaccgctacgaagatgaggatggcggcctgtccatctatgatatcgacttcgtatacgagccgggcgtcgaccggcaccccgaaggcgcgggtttcaagataatcgatcatctgacccacaatgtctatggcggccgcatggcccattgggcgagcttctacgagcgcgtcttcggcttccgcgagattcgctatttcgacatcaagggggaatataccggcctcaccagcaaggcgatgaccgcgcccgacggcaagatccgtatccccttgaacgaagagggcaaggctggcggcggccagatcgaagaattcctgcgcgcctataatggcgaaggcatccagcatatcgccttcctgtgcgacgacctcatcgccgcgtgggacaagctcaaggcgctgggcacccctttgatgaccgcaccgcccgccacctattatgagatgcttgacgaacgcctgcccggtcatggcgagccggtcgcggaattgcagaagcgcggtatcctgctagacggttcgacgcagcagggcgatcctcgcttgctgctccagatcgctgggcaagccacaatcgggccggtcttcttcgaattcattcaacgcaagaaggatgaagggttcggcgaaggaaacttcaccgccctgttcgagagcatggagcgcgaccaactgcgccgtggcaccttgaatgcaggggagtcggcgtga

SEQ ID NO: 158 - DNA, 1092 bp, Artificial Sequence
  N2HPPDm-F372A-02 Nucleotide Sequence
atgacattgtttgataacccattgggacttgatggttttgagttcgttgagttttctgctccagcaaagggtatgcttgaacctgtttttgctgcaatgggattcgtgatgattgctagacataggtcaaaggatgtgcaattgtggagacagggaggtattaaccttatcgcaaactacgaaccaagatctccagctgcatactttgctgcagagcacggtccatcagcttgtggtatgggatggagagttaggaatgctgcaaaggcttatgagttggcagtggaaaggggtgctgagcctgttgatgtgaagaccggacctatggagcttagacttcctgcaattaggggtattggaggatctattatctatcttatcgatagatacgaggatgaagatggaggtctttcaatctatgatatcgatttcgtttacgaaccaggagtggatagacatcctgagggtgctggattcaagattattgatcatttgacccacaacgtttatggaggtagaatggctcactgggcatctttttacgaaagggtgtttggtttcagagagatcaggtacttcgatattaagggagaatacactggtcttacatcaaaggctatgactgcaccagatggaaagattaggattccattgaacgaggaaggaaaggctggaggtggacaaattgaggaatttcttagagcttacaatggtgaaggtattcaacatattgcattcttgtgcgatgatcttattgctgcatgggataagttgaaggcacttggaacccctttgatgactgctccacctgcaacttattacgaaatgttggatgagagacttccaggtcacggagaacctgttgctgagcttcaaaagaggggaattttgttggatggttctactcaacagggagatccaagacttttgcttcaaattgctggtcaggcaacaattggacctgtgtttttcgagtttattcaaaggaagaaggatgaaggtttcggagagggtaactttacagctcttttcgagtctatggaaagagatcagttgagaaggggaactcttaatgctggagagtcagcatga

SEQ ID NO: 159 - protein, 365 aa, Artificial Sequence
  N3HPPD Amino Acid Sequence (Burkholderia)
MQIPNWENPVGTDGFEFIEYTAPDPKALGQLFERMGFTAIARHRHKDVTVYRQGDINFIINAEPHSFAQRFARLHGPSICAIAFRVQDAAKAYQHALELGAWGFDNKTGPMELNIPAIKGIGDSLIYFVDRWRGKNGAQPGAIGDISIYDVDFEPIAGANPNPAGHGLTYIDHLTHNVHRGRMQEWAEFYERLFNFREVRYFDIEGKVTGVKSKAMTSPCGKIRIPINEEGSDTAGQIQEYLDAYHGEGIQHIALGTNDIYGAVDGLRGKEVKLLDTIDTYYELVDRRVPDHGESLDELKKRKILIDGARDDLLLQIFTENQIGPIFFEIIQRKGNQGFGEGNFKALFESIELDQIRRGVVQDKA

SEQ ID NO: 160 - DNA, 1098 bp, Artificial Sequence
  N3HPPD-01 Nucleotide Sequence (Burkholderia)
atgcagatccccaactgggaaaaccccgtcggcaccgacggcttcgaattcatcgaatacaccgcaccggatccgaaagcactcggacaactgttcgaacggatgggtttcaccgcgatcgcacgccatcgccacaaggacgtgacggtctaccgtcagggcgacatcaacttcatcatcaacgccgaaccccattcgttcgcgcaacgtttcgcgcgcctgcacggcccgtcgatctgcgcgatcgcgttccgtgtgcaggacgccgcgaaggcataccagcacgcgctcgaactcggcgcatggggcttcgacaacaagaccggcccgatggagctgaacatcccggcgatcaagggcatcggcgattcgctgatctatttcgtcgaccgctggcgcggcaagaacggcgcgcagccgggcgcgatcggcgacatcagcatctacgacgtcgacttcgagccgatcgccggcgcgaacccgaacccggccggccacggcctcacctatatcgaccacctgacgcacaacgtgcatcgcggccgcatgcaggaatgggcggagttctacgagcgcctgttcaacttccgcgaagtgcgctacttcgacatcgaaggcaaggtgacgggcgtgaagtcgaaggcgatgacgtcgccgtgcggcaagatccggatcccgatcaacgaggaaggctcggacacggccggccagatccaggaatacctcgacgcgtaccacggcgaaggcatccagcacatcgcgctcggcacgaacgacatctacggcgcggtcgacggcctgcgcggcaaggaagtgaagctgctcgacacgatcgacacgtactacgagctggtcgaccgccgcgtgccggaccacggcgaatcgctggacgagctgaagaagcgcaagatcctgatcgacggcgcgcgcgacgacctgctgctgcagatcttcaccgagaaccagatcgggccgatcttcttcgagatcatccagcgcaagggcaaccagggcttcggcgaaggcaacttcaaggcgctgttcgaatcgatcgaactcgaccagatccgccgcggcgtggtccaggacaaggcctga

SEQ ID NO: 161 - DNA, 1098 bp, Artificial Sequence
  N3HPPD-02 Nucleotide Sequence
atgcaaattccaaactgggaaaatcctgttggtactgatggatttgagttcattgaatatacagctccagatcctaaggcattgggtcagctttttgagagaatgggattcaccgctattgcaagacataggcacaaggatgttactgtgtacaggcaaggagatattaacttcattattaacgctgaaccacactcttttgctcagagattcgcaaggttgcatggaccttcaatttgtgctattgcttttagagtgcaagatgctgcaaaggcttatcagcacgcattggaacttggtgcttggggattcgataacaagactggtcctatggagcttaatattcctgcaattaagggaatcggagattctcttatctatttcgttgatagatggaggggaaagaacggtgctcaaccaggtgcaattggagatatttcaatctatgatgtggatttcgagcctattgctggtgcaaacccaaatcctgctggacatggtttgacctacattgatcatcttactcacaacgttcatagaggaaggatgcaggagtgggcagaattttacgagagattgtttaatttcagagaagtgaggtacttcgatattgagggaaaggttacaggagtgaagtctaaggctatgacctcaccatgcggaaagattaggattcctattaacgaggaaggttctgatacagctggacaaattcaggaatatcttgatgcataccacggagagggtattcaacatattgctcttggaactaatgatatctatggagcagttgatggtcttagaggaaaggaagttaagttgttggatactatcgatacatattacgagttggttgatagaagggtgccagatcacggtgaatctttggatgagcttaagaagagaaagattcttattgatggagctagggatgatcttttgcttcaaatttttacagaaaaccagatcggtcctattttctttgagattattcaaaggaagggaaaccagggattcggtgaaggaaacttcaaggctttgttcgaatcaatcgagcttgatcaaattagaaggggtgttgtgcaggataaggcatga

SEQ ID NO: 162 - protein, 365 aa, Artificial Sequence
  N3HPPDm-F372A Amino Acid Sequence
MQIPNWENPVGTDGFEFIEYTAPDPKALGQLFERMGFTAIARHRHKDVTVYRQGDINFIINAEPHSFAQRFARLHGPSICAIAFRVQDAAKAYQHALELGAWGFDNKTGPMELNIPAIKGIGDSLIYFVDRWRGKNGAQPGAIGDISIYDVDFEPIAGANPNPAGHGLTYIDHLTHNVHRGRMQEWAEFYERLFNFREVRYFDIEGKVTGVKSKAMTSPCGKIRIPINEEGSDTAGQIQEYLDAYHGEGIQHIALGTNDIYGAVDGLRGKEVKLLDTIDTYYELVDRRVPDHGESLDELKKRKILIDGARDDLLLQIATENQIGPIFFEIIQRKGNQGFGEGNFKALFESIELDQIRRGVVQDKA

SEQ ID NO: 163 - DNA, 1098 bp, Artificial Sequence
  N3HPPDm-F372A-01 Nucleotide Sequence
atgcagatccccaactgggaaaaccccgtcggcaccgacggcttcgaattcatcgaatacaccgcaccggatccgaaagcactcggacaactgttcgaacggatgggtttcaccgcgatcgcacgccatcgccacaaggacgtgacggtctaccgtcagggcgacatcaacttcatcatcaacgccgaaccccattcgttcgcgcaacgtttcgcgcgcctgcacggcccgtcgatctgcgcgatcgcgttccgtgtgcaggacgccgcgaaggcataccagcacgcgctcgaactcggcgcatggggcttcgacaacaagaccggcccgatggagctgaacatcccggcgatcaagggcatcggcgattcgctgatctatttcgtcgaccgctggcgcggcaagaacggcgcgcagccgggcgcgatcggcgacatcagcatctacgacgtcgacttcgagccgatcgccggcgcgaacccgaacccggccggccacggcctcacctatatcgaccacctgacgcacaacgtgcatcgcggccgcatgcaggaatgggcggagttctacgagcgcctgttcaacttccgcgaagtgcgctacttcgacatcgaaggcaaggtgacgggcgtgaagtcgaaggcgatgacgtcgccgtgcggcaagatccggatcccgatcaacgaggaaggctcggacacggccggccagatccaggaatacctcgacgcgtaccacggcgaaggcatccagcacatcgcgctcggcacgaacgacatctacggcgcggtcgacggcctgcgcggcaaggaagtgaagctgctcgacacgatcgacacgtactacgagctggtcgaccgccgcgtgccggaccacggcgaatcgctggacgagctgaagaagcgcaagatcctgatcgacggcgcgcgcgacgacctgctgctgcagatcgctaccgagaaccagatcgggccgatcttcttcgagatcatccagcgcaagggcaaccagggcttcggcgaaggcaacttcaaggcgctgttcgaatcgatcgaactcgaccagatccgccgcggcgtggtccaggacaaggcctga

SEQ ID NO: 164 - DNA, 1098 bp, Artificial Sequence
  N3HPPDm-F372A-02 Nucleotide Sequence
atgcaaattccaaactgggaaaatcctgttggtactgatggatttgagttcattgaatatacagctccagatcctaaggcattgggtcagctttttgagagaatgggattcaccgctattgcaagacataggcacaaggatgttactgtgtacaggcaaggagatattaacttcattattaacgctgaaccacactcttttgctcagagattcgcaaggttgcatggaccttcaatttgtgctattgcttttagagtgcaagatgctgcaaaggcttatcagcacgcattggaacttggtgcttggggattcgataacaagactggtcctatggagcttaatattcctgcaattaagggaatcggagattctcttatctatttcgttgatagatggaggggaaagaacggtgctcaaccaggtgcaattggagatatttcaatctatgatgtggatttcgagcctattgctggtgcaaacccaaatcctgctggacatggtttgacctacattgatcatcttactcacaacgttcatagaggaaggatgcaggagtgggcagaattttacgagagattgtttaatttcagagaagtgaggtacttcgatattgagggaaaggttacaggagtgaagtctaaggctatgacctcaccatgcggaaagattaggattcctattaacgaggaaggttctgatacagctggacaaattcaggaatatcttgatgcataccacggagagggtattcaacatattgctcttggaactaatgatatctatggagcagttgatggtcttagaggaaaggaagttaagttgttggatactatcgatacatattacgagttggttgatagaagggtgccagatcacggtgaatctttggatgagcttaagaagagaaagattcttattgatggagctagggatgatcttttgcttcaaattgctacagaaaaccagatcggtcctattttctttgagattattcaaaggaagggaaaccagggattcggtgaaggaaacttcaaggctttgttcgaatcaatcgagcttgatcaaattagaaggggtgttgtgcaggataaggcatga

SEQ ID NO: 165 - protein, 365 aa, Artificial Sequence
  N4HPPD Amino Acid Sequence (Burkholderia)
MQIPNWENPVGTDGFEFIEYTAPDPKALGQLFERMGFTAIARHRHKDVTVYRQGDINFIINAEPDSFAQRFARLHGPSICAIAFRVQDAAKAYQHALELGAWGFDNKTGPMELNIPAIKGIGDSLIYFVDRWRGKNGAQPGAIGDISIYDVDFEPIAGATPNPAGHGLTYIDHLTHNVHRGRMQEWAEFYERLFNFREVRYFDIEGKVTGVKSKAMTSPCGKIRIPINEEGSDTAGQIQEYLDAYHGEGIQHIALGTSDIYGAVDGLRGKEVKLLDTIDTYYELVDRRVPDHGESLDELKKRKILIDGARDDLLLQIFTENQIGPIFFEIIQRKGNQGFGEGTFKALFESIELDQIRRGVVQDKA

SEQ ID NO: 166 - DNA, 1098 bp, Artificial Sequence
  N4HPPD-01 Nucleotide Sequence (Burkholderia)
atgcagatccccaactgggaaaaccccgtcggcaccgacggcttcgaattcatcgaatacaccgcaccggatccgaaagcactcggacaactgttcgaacggatgggtttcaccgcgatcgcacgccatcgccacaaggacgtgacggtctaccgtcagggcgacatcaacttcatcatcaacgccgaacccgattcgttcgcgcaacgcttcgcgcgcctgcacggcccgtcgatctgcgcgatcgcgttccgtgtgcaggacgccgcgaaggcataccagcacgcactcgaactcggcgcatggggcttcgacaacaagaccggcccgatggagctgaacatcccggcgatcaagggcatcggcgattcgctgatctatttcgtcgatcgctggcgcggcaagaacggcgcgcagccgggcgcgatcggcgacatcagcatctacgacgtcgacttcgagccgatcgccggcgcgaccccgaacccggccggccacggcctcacctacatcgaccacctgacgcacaacgtgcatcgcggccgcatgcaggaatgggcggagttctacgaacgcctgttcaacttccgcgaagtgcgctacttcgacatcgaaggcaaggtgacgggcgtgaagtcgaaggcgatgacgtcgccgtgcggcaagatccggatcccgatcaacgaggaaggctcggacacggccggccagatccaggaatacctcgacgcgtaccacggcgaaggcatccagcacatcgcgctcggcacgagcgacatctacggcgcggtcgacggcctgcgcggcaaggaagtgaagctgctcgacacgatcgacacgtattacgagctggtcgaccgccgcgtgccggaccacggcgaatcgctggacgagctgaagaagcgcaagatcctgatcgacggcgcgcgcgacgacctgctgctgcagatctttaccgagaaccagatcgggccgatcttcttcgagatcatccagcgcaagggcaaccagggcttcggcgaaggcaccttcaaggcgctgttcgaatcgatcgaactcgaccagatccgccgcggcgtggtccaggacaaggcctga

SEQ ID NO: 167 - DNA, 1098 bp, Artificial Sequence
  N4HPPD-02 Nucleotide Sequence
atgcaaattccaaactgggaaaatcctgttggtactgatggatttgagttcattgaatatacagctccagatcctaaggcattgggtcagctttttgagagaatgggattcaccgctattgcaagacataggcacaaggatgttactgtgtacaggcaaggagatattaacttcattattaacgctgaaccagattcttttgctcagagattcgcaaggttgcatggaccttcaatttgtgctattgcttttagagtgcaagatgctgcaaaggcttatcagcacgcattggaacttggtgcttggggattcgataacaagactggtcctatggagcttaatattcctgcaattaagggaatcggagattctcttatctatttcgttgatagatggaggggaaagaacggtgctcaaccaggtgcaattggagatatttcaatctatgatgtggatttcgagcctattgctggtgcaaccccaaatcctgctggacatggtttgacctacattgatcatcttactcacaacgttcatagaggaaggatgcaggagtgggcagaattttacgagagattgtttaatttcagagaagtgaggtacttcgatattgagggaaaggttacaggagtgaagtctaaggctatgacctcaccatgcggaaagattaggattcctattaacgaggaaggttctgatacagctggacaaattcaggaatatcttgatgcataccacggagagggtattcaacatattgctcttggaacttctgatatctatggagcagttgatggtcttagaggaaaggaagttaagttgttggatactatcgatacatattacgagttggttgatagaagggtgccagatcacggtgaatctttggatgagcttaagaagagaaagattcttattgatggagctagggatgatcttttgcttcaaatttttacagaaaaccagatcggtcctattttctttgagattattcaaaggaagggaaaccagggattcggtgaaggaaccttcaaggctttgttcgaatcaatcgagcttgatcaaattagaaggggtgttgtgcaggataaggcatga

SEQ ID NO: 168 - protein, 365 aa, Artificial Sequence
  N4HPPDm-F372A Amino Acid Sequence
MQIPNWENPVGTDGFEFIEYTAPDPKALGQLFERMGFTAIARHRHKDVTVYRQGDINFIINAEPDSFAQRFARLHGPSICAIAFRVQDAAKAYQHALELGAWGFDNKTGPMELNIPAIKGIGDSLIYFVDRWRGKNGAQPGAIGDISIYDVDFEPIAGATPNPAGHGLTYIDHLTHNVHRGRMQEWAEFYERLFNFREVRYFDIEGKVTGVKSKAMTSPCGKIRIPINEEGSDTAGQIQEYLDAYHGEGIQHIALGTSDIYGAVDGLRGKEVKLLDTIDTYYELVDRRVPDHGESLDELKKRKILIDGARDDLLLQIATENQIGPIFFEIIQRKGNQGFGEGTFKALFESIELDQIRRGVVQDKA

SEQ ID NO: 169 - DNA, 1098 bp, Artificial Sequence
  N4HPPDm-F372A-01 Nucleotide Sequence
atgcagatccccaactgggaaaaccccgtcggcaccgacggcttcgaattcatcgaatacaccgcaccggatccgaaagcactcggacaactgttcgaacggatgggtttcaccgcgatcgcacgccatcgccacaaggacgtgacggtctaccgtcagggcgacatcaacttcatcatcaacgccgaacccgattcgttcgcgcaacgcttcgcgcgcctgcacggcccgtcgatctgcgcgatcgcgttccgtgtgcaggacgccgcgaaggcataccagcacgcactcgaactcggcgcatggggcttcgacaacaagaccggcccgatggagctgaacatcccggcgatcaagggcatcggcgattcgctgatctatttcgtcgatcgctggcgcggcaagaacggcgcgcagccgggcgcgatcggcgacatcagcatctacgacgtcgacttcgagccgatcgccggcgcgaccccgaacccggccggccacggcctcacctacatcgaccacctgacgcacaacgtgcatcgcggccgcatgcaggaatgggcggagttctacgaacgcctgttcaacttccgcgaagtgcgctacttcgacatcgaaggcaaggtgacgggcgtgaagtcgaaggcgatgacgtcgccgtgcggcaagatccggatcccgatcaacgaggaaggctcggacacggccggccagatccaggaatacctcgacgcgtaccacggcgaaggcatccagcacatcgcgctcggcacgagcgacatctacggcgcggtcgacggcctgcgcggcaaggaagtgaagctgctcgacacgatcgacacgtattacgagctggtcgaccgccgcgtgccggaccacggcgaatcgctggacgagctgaagaagcgcaagatcctgatcgacggcgcgcgcgacgacctgctgctgcagatcgctaccgagaaccagatcgggccgatcttcttcgagatcatccagcgcaagggcaaccagggcttcggcgaaggcaccttcaaggcgctgttcgaatcgatcgaactcgaccagatccgccgcggcgtggtccaggacaaggcctga

SEQ ID NO: 170 - DNA, 1098 bp, Artificial Sequence
  N4HPPDm-F372A-02 Nucleotide Sequence
atgcaaattccaaactgggaaaatcctgttggtactgatggatttgagttcattgaatatacagctccagatcctaaggcattgggtcagctttttgagagaatgggattcaccgctattgcaagacataggcacaaggatgttactgtgtacaggcaaggagatattaacttcattattaacgctgaaccagattcttttgctcagagattcgcaaggttgcatggaccttcaatttgtgctattgcttttagagtgcaagatgctgcaaaggcttatcagcacgcattggaacttggtgcttggggattcgataacaagactggtcctatggagcttaatattcctgcaattaagggaatcggagattctcttatctatttcgttgatagatggaggggaaagaacggtgctcaaccaggtgcaattggagatatttcaatctatgatgtggatttcgagcctattgctggtgcaaccccaaatcctgctggacatggtttgacctacattgatcatcttactcacaacgttcatagaggaaggatgcaggagtgggcagaattttacgagagattgtttaatttcagagaagtgaggtacttcgatattgagggaaaggttacaggagtgaagtctaaggctatgacctcaccatgcggaaagattaggattcctattaacgaggaaggttctgatacagctggacaaattcaggaatatcttgatgcataccacggagagggtattcaacatattgctcttggaacttctgatatctatggagcagttgatggtcttagaggaaaggaagttaagttgttggatactatcgatacatattacgagttggttgatagaagggtgccagatcacggtgaatctttggatgagcttaagaagagaaagattcttattgatggagctagggatgatcttttgcttcaaattgctacagaaaaccagatcggtcctattttctttgagattattcaaaggaagggaaaccagggattcggtgaaggaaccttcaaggctttgttcgaatcaatcgagcttgatcaaattagaaggggtgttgtgcaggataaggcatga

SEQ ID NO: 171 - protein, 350 aa, Artificial Sequence
  N5HPPD Amino Acid Sequence (Burkholderia)
MAADSENPLGLHGFAFAEFTSPDPAAMARQFEQLGFVPAARRKDRGLTLYRQGRIAFILNAGEGEQASAFRAAHGPSANGMAFNVADAKAAHRHAIQSGATDADTAQSALPGTYAIEGIGDSLLYLVDSDPFADWDEVPGWREASAERGVGLDLLDHLTHNVRRGQMRVWSEFYATLFGFEEQKFFDIKGQATGLFSQAMIAPDHEIRIPLNESQDDNSQIEEFIREYNGEGIQHLALTTPDIYSTVEKLRANGVRLQDTIDTYYDLVDERVPGHGEDLARLRKNRILIDGDVHDEGLLLQIFTETMFGPIFFEIIQRKGNEGFGNGNFQVLFESIELDQIRRGVVTVDA

SEQ ID NO: 172 - DNA, 1053 bp, Artificial Sequence
  N5HPPD-01 Nucleotide Sequence (Burkholderia)
atggccgccgattccgaaaatccgttgggcctgcatggctttgcgtttgctgaatttacctcacccgatccggccgcgatggcgcggcagttcgagcagcttggatttgttccggcggcgcgccggaaggacagggggctgacgctttaccggcaggggcgcatcgcgttcattctgaatgccggggagggcgaacaggccagcgcgtttcgcgccgcccatggcccatccgccaacggcatggcgtttaacgtcgccgacgcgaaagcagcgcaccggcacgccattcaaagtggggcgacagacgctgataccgcgcagagcgctctgccggggacttatgccattgagggcataggcgactcgctgctctatctggtggacagcgacccctttgcggactgggatgaggtgcccggttggcgagaggcgtcggcggagcggggcgtcggcctcgacctgctcgaccacctgacccataatgtccgccgggggcagatgcgcgtatggtccgaattctacgcgacgctgttcggtttcgaggaacagaagttcttcgacatcaaagggcaggcgaccggtctgttcagccaggcgatgatcgccccggatcatgaaatccgcatccctctgaatgaaagccaggatgataacagccagatcgaggagtttatccgcgaatataatggcgagggtatccagcatctcgccctgacgacgccggatatctattccacggtggagaagctacgcgccaatggcgtgcggctgcaggatacgatcgacacctattatgatctggtcgacgagcgggtgccggggcatggcgaggatctggcgcgattgcgcaaaaaccgcatcctgatcgatggcgatgtccatgatgaggggctgctgctgcagatattcaccgagactatgttcggcccgatcttcttcgagatcatccagcgcaagggcaatgagggtttcgggaacggcaatttccaggtactcttcgaatccatagaattggaccagatccggcgcggcgttgtgacggtcgatgcctga

SEQ ID NO: 173 - DNA, 1053 bp, Artificial Sequence
  N5HPPD-02 Nucleotide Sequence
atggctgctgattctgaaaatcctttgggattgcatggatttgcttttgctgaatttacttctcctgatcctgctgctatggctagacaatttgaacaattgggatttgttcctgctgctagaagaaaggatagaggattgactttgtatagacaaggaagaattgcttttattttgaatgctggagaaggagaacaagcttctgcttttagagctgctcatggaccttctgctaatggaatggcttttaatgttgctgatgctaaggctgctcatagacatgctattcaatctggagctactgatgctgatactgctcaatctgctttgcctggaacttatgctattgaaggaattggagattctttgttgtatttggttgattctgatccttttgctgattgggatgaagttcctggatggagagaagcttctgctgaaagaggagttggattggatttgttggatcatttgactcataatgttagaagaggacaaatgagagtttggtctgaattttatgctactttgtttggatttgaagaacaaaagttttttgatattaagggacaagctactggattgttttctcaagctatgattgctcctgatcatgaaattagaattcctttgaatgaatctcaagatgataattctcaaattgaagaatttattagagaatataatggagaaggaattcaacatttggctttgactactcctgatatttattctactgttgaaaagttgagagctaatggagttagattgcaagatactattgatacttattatgatttggttgatgaaagagttcctggacatggagaagatttggctagattgagaaagaatagaattttgattgatggagatgttcatgatgaaggattgttgttgcaaatttttactgaaactatgtttggacctattttttttgaaattattcaaagaaagggaaatgaaggatttggaaatggaaattttcaagttttgtttgaatctattgaattggatcaaattagaagaggagttgttactgttgatgcttga

SEQ ID NO: 174 - protein, 350 aa, Artificial Sequence
  N5HPPDm-F372A Amino Acid Sequence
MAADSENPLGLHGFAFAEFTSPDPAAMARQFEQLGFVPAARRKDRGLTLYRQGRIAFILNAGEGEQASAFRAAHGPSANGMAFNVADAKAAHRHAIQSGATDADTAQSALPGTYAIEGIGDSLLYLVDSDPFADWDEVPGWREASAERGVGLDLLDHLTHNVRRGQMRVWSEFYATLFGFEEQKFFDIKGQATGLFSQAMIAPDHEIRIPLNESQDDNSQIEEFIREYNGEGIQHLALTTPDIYSTVEKLRANGVRLQDTIDTYYDLVDERVPGHGEDLARLRKNRILIDGDVHDEGLLLQIATETMFGPIFFEIIQRKGNEGFGNGNFQVLFESIELDQIRRGVVTVDA

SEQ ID NO: 175 - DNA, 1053 bp, Artificial Sequence
  N5HPPDm-F372A-01 Nucleotide Sequence
atggccgccgattccgaaaatccgttgggcctgcatggctttgcgtttgctgaatttacctcacccgatccggccgcgatggcgcggcagttcgagcagcttggatttgttccggcggcgcgccggaaggacagggggctgacgctttaccggcaggggcgcatcgcgttcattctgaatgccggggagggcgaacaggccagcgcgtttcgcgccgcccatggcccatccgccaacggcatggcgtttaacgtcgccgacgcgaaagcagcgcaccggcacgccattcaaagtggggcgacagacgctgataccgcgcagagcgctctgccggggacttatgccattgagggcataggcgactcgctgctctatctggtggacagcgacccctttgcggactgggatgaggtgcccggttggcgagaggcgtcggcggagcggggcgtcggcctcgacctgctcgaccacctgacccataatgtccgccgggggcagatgcgcgtatggtccgaattctacgcgacgctgttcggtttcgaggaacagaagttcttcgacatcaaagggcaggcgaccggtctgttcagccaggcgatgatcgccccggatcatgaaatccgcatccctctgaatgaaagccaggatgataacagccagatcgaggagtttatccgcgaatataatggcgagggtatccagcatctcgccctgacgacgccggatatctattccacggtggagaagctacgcgccaatggcgtgcggctgcaggatacgatcgacacctattatgatctggtcgacgagcgggtgccggggcatggcgaggatctggcgcgattgcgcaaaaaccgcatcctgatcgatggcgatgtccatgatgaggggctgctgctgcagatagctaccgagactatgttcggcccgatcttcttcgagatcatccagcgcaagggcaatgagggtttcgggaacggcaatttccaggtactcttcgaatccatagaattggaccagatccggcgcggcgttgtgacggtcgatgcctga

SEQ ID NO: 176 - DNA, 1053 bp, Artificial Sequence
  N5HPPDm-F372A-02 Nucleotide Sequence
atggctgctgattctgaaaatcctttgggattgcatggatttgcttttgctgaatttacttctcctgatcctgctgctatggctagacaatttgaacaattgggatttgttcctgctgctagaagaaaggatagaggattgactttgtatagacaaggaagaattgcttttattttgaatgctggagaaggagaacaagcttctgcttttagagctgctcatggaccttctgctaatggaatggcttttaatgttgctgatgctaaggctgctcatagacatgctattcaatctggagctactgatgctgatactgctcaatctgctttgcctggaacttatgctattgaaggaattggagattctttgttgtatttggttgattctgatccttttgctgattgggatgaagttcctggatggagagaagcttctgctgaaagaggagttggattggatttgttggatcatttgactcataatgttagaagaggacaaatgagagtttggtctgaattttatgctactttgtttggatttgaagaacaaaagttttttgatattaagggacaagctactggattgttttctcaagctatgattgctcctgatcatgaaattagaattcctttgaatgaatctcaagatgataattctcaaattgaagaatttattagagaatataatggagaaggaattcaacatttggctttgactactcctgatatttattctactgttgaaaagttgagagctaatggagttagattgcaagatactattgatacttattatgatttggttgatgaaagagttcctggacatggagaagatttggctagattgagaaagaatagaattttgattgatggagatgttcatgatgaaggattgttgttgcaaattgctactgaaactatgtttggacctattttttttgaaattattcaaagaaagggaaatgaaggatttggaaatggaaattttcaagttttgtttgaatctattgaattggatcaaattagaagaggagttgttactgttgatgcttga

SEQ ID NO: 177 - protein, 471 aa, Triticum aestivum
  TaHPPD1 Amino Acid Sequence
MMNAHANLALAALAFPAHMPNSKSSHIRSRRTRRPLLPLTMAAHPPIRTNIGMSTHGSASGGGEQAGISSTDRFRMIDFHHVEFWCADAASAAARFSFGLGVPLAAESGLSTGNTAHASHLLHSRSGSLALLFSAPYAQGDAVTASVPSFDADAARRFTADHGLAVRAMAVRVPDAGEAFRTSVDAGARPSFAPAELGHGFELAEVQLYGDVVLRFVSHPDDTAIPFLPGFGSVPSSGATPDYGLTRFDHIVGDVPHLAPVAAYIAGFTGFHEFSRFTADQVGTAESSLNVVVLANNSENVLLTVVEPVHGTKRRSQVQTYLDHHGGPGVQHLAMASNDVLGTLRKIRGRSTMGGFELLPPPPASYYDDVRRRAGDVLSEAQIKGCQELGVRVDKDDHGGVVLQIFTKAAGDRPTLLLEFIQRIGCMDKDENGQEYQRGGCGGFGQGNVTELFKSIEDYEKSLDASARLAA

SEQ ID NO: 178 - DNA, 1416 bp, Triticum aestivum
  TaHPPD1-01 Nucleotide Sequence
atgatgaatgcccacgccaacctagctctggccgctttggcattcccagcccacatgcccaactctaaatcgtcccacatccgatcacgacgcaccagacgcccactccttccactcacaatggcggcacatccaccaatccgaacaaacatcggaatgagcacccatggcagtgccagtggcggcggggagcaagccggcatctccagcacggaccgattccgcatgatagacttccaccacgtcgagttttggtgcgccgatgccgcctccgccgccgcacgcttctccttcgggctcggcgtgccactcgcggcagagtccggcctctccacggggaacaccgcgcacgcctcccacctactccactcacgctcgggctctctcgcgctcctcttcagcgccccatacgcacagggcgacgcggtcaccgcgtccgtgccctccttcgacgccgacgccgcacgccgctttaccgcagatcacggcctggcggtgcgcgccatggccgtccgtgtcccggacgccggcgaggccttccgcacgagcgttgacgctggagcgcgcccgtcctttgcccctgctgagcttggacacggcttcgagctcgcggaggtccagctctacggagacgtcgttctccgcttcgtgagccacccagacgacacggccatacccttcttgccggggttcgggagcgtccccagctccggggctacaccggactacgggctcacgcggtttgaccacatcgtcggcgacgtccctcacctggctccggtcgctgcatacatagccgggttcacagggttccacgagttctctcgcttcactgcggaccaggtgggcacggccgagagctccctcaacgtcgtggtgctcgccaacaattcagagaacgtgctgctcaccgtcgtcgagccagtgcatggcaccaagcgccggagccaggtacagacctacctggaccaccacggcggcccaggcgtgcagcacctggcgatggccagcaacgacgtgcttggcacgttgaggaagattcgtgggcggtccaccatgggcggctttgagcttctgccaccgccaccggccagctactatgacgatgtaaggcggcgcgctggggacgtgctgtcagaagcacagattaaggggtgccaggagctaggcgtacgggtggacaaggatgaccatggaggtgttgtgctccaaatcttcacaaaggcggcgggcgacaggccaaccttgctcttggagtttatccaaaggatcggatgcatggacaaggacgagaacgggcaggaataccagagaggtggctgcggtggatttggccagggtaacgtcactgagctgttcaagtccattgaggactatgaaaagtcccttgacgcttctgcacgcctggccgcctaa

SEQ ID NO: 179 - DNA, 1416 bp, Artificial Sequence
  TaHPPD1-02 Nucleotide Sequence
atgatgaatgctcatgctaatttggctttggctgctttggcttttcctgctcatatgcctaattctaagtcttctcatattagatctagaagaactagaagacctttgttgcctttgactatggctgctcatcctcctattagaactaatattggaatgtctactcatggatctgcttctggaggaggagaacaagctggaatttcttctactgatagatttagaatgattgattttcatcatgttgaattttggtgtgctgatgctgcttctgctgctgctagattttcttttggattgggagttcctttggctgctgaatctggattgtctactggaaatactgctcatgcttctcatttgttgcattctagatctggatctttggctttgttgttttctgctccttatgctcaaggagatgctgttactgcttctgttccttcttttgatgctgatgctgctagaagatttactgctgatcatggattggctgttagagctatggctgttagagttcctgatgctggagaagcttttagaacttctgttgatgctggagctagaccttcttttgctcctgctgaattgggacatggatttgaattggctgaagttcaattgtatggagatgttgttttgagatttgtttctcatcctgatgatactgctattccttttttgcctggatttggatctgttccttcttctggagctactcctgattatggattgactagatttgatcatattgttggagatgttcctcatttggctcctgttgctgcttatattgctggatttactggatttcatgaattttctagatttactgctgatcaagttggaactgctgaatcttctttgaatgttgttgttttggctaataattctgaaaatgttttgttgactgttgttgaacctgttcatggaactaagagaagatctcaagttcaaacttatttggatcatcatggaggacctggagttcaacatttggctatggcttctaatgatgttttgggaactttgagaaagattagaggaagatctactatgggaggatttgaattgttgcctcctcctcctgcttcttattatgatgatgttagaagaagagctggagatgttttgtctgaagctcaaattaagggatgtcaagaattgggagttagagttgataaggatgatcatggaggagttgttttgcaaatttttactaaggctgctggagatagacctactttgttgttggaatttattcaaagaattggatgtatggataaggatgaaaatggacaagaatatcaaagaggaggatgtggaggatttggacaaggaaatgttactgaattgtttaagtctattgaagattatgaaaagtctttggatgcttctgctagattggctgcttga

SEQ ID NO: 180 - protein, 471 aa, Artificial Sequence
  TaHPPD1m-F372A Amino Acid Sequence
MMNAHANLALAALAFPAHMPNSKSSHIRSRRTRRPLLPLTMAAHPPIRTNIGMSTHGSASGGGEQAGISSTDRFRMIDFHHVEFWCADAASAAARFSFGLGVPLAAESGLSTGNTAHASHLLHSRSGSLALLFSAPYAQGDAVTASVPSFDADAARRFTADHGLAVRAMAVRVPDAGEAFRTSVDAGARPSFAPAELGHGFELAEVQLYGDVVLRFVSHPDDTAIPFLPGFGSVPSSGATPDYGLTRFDHIVGDVPHLAPVAAYIAGFTGFHEFSRFTADQVGTAESSLNVVVLANNSENVLLTVVEPVHGTKRRSQVQTYLDHHGGPGVQHLAMASNDVLGTLRKIRGRSTMGGFELLPPPPASYYDDVRRRAGDVLSEAQIKGCQELGVRVDKDDHGGVVLQIATKAAGDRPTLLLEFIQRIGCMDKDENGQEYQRGGCGGFGQGNVTELFKSIEDYEKSLDASARLAA

SEQ ID NO: 181 - DNA, 1416 bp, Artificial Sequence
  TaHPPD1m-F372A-01 Nucleotide Sequence
atgatgaatgcccacgccaacctagctctggccgctttggcattcccagcccacatgcccaactctaaatcgtcccacatccgatcacgacgcaccagacgcccactccttccactcacaatggcggcacatccaccaatccgaacaaacatcggaatgagcacccatggcagtgccagtggcggcggggagcaagccggcatctccagcacggaccgattccgcatgatagacttccaccacgtcgagttttggtgcgccgatgccgcctccgccgccgcacgcttctccttcgggctcggcgtgccactcgcggcagagtccggcctctccacggggaacaccgcgcacgcctcccacctactccactcacgctcgggctctctcgcgctcctcttcagcgccccatacgcacagggcgacgcggtcaccgcgtccgtgccctccttcgacgccgacgccgcacgccgctttaccgcagatcacggcctggcggtgcgcgccatggccgtccgtgtcccggacgccggcgaggccttccgcacgagcgttgacgctggagcgcgcccgtcctttgcccctgctgagcttggacacggcttcgagctcgcggaggtccagctctacggagacgtcgttctccgcttcgtgagccacccagacgacacggccatacccttcttgccggggttcgggagcgtccccagctccggggctacaccggactacgggctcacgcggtttgaccacatcgtcggcgacgtccctcacctggctccggtcgctgcatacatagccgggttcacagggttccacgagttctctcgcttcactgcggaccaggtgggcacggccgagagctccctcaacgtcgtggtgctcgccaacaattcagagaacgtgctgctcaccgtcgtcgagccagtgcatggcaccaagcgccggagccaggtacagacctacctggaccaccacggcggcccaggcgtgcagcacctggcgatggccagcaacgacgtgcttggcacgttgaggaagattcgtgggcggtccaccatgggcggctttgagcttctgccaccgccaccggccagctactatgacgatgtaaggcggcgcgctggggacgtgctgtcagaagcacagattaaggggtgccaggagctaggcgtacgggtggacaaggatgaccatggaggtgttgtgctccaaatcgctacaaaggcggcgggcgacaggccaaccttgctcttggagtttatccaaaggatcggatgcatggacaaggacgagaacgggcaggaataccagagaggtggctgcggtggatttggccagggtaacgtcactgagctgttcaagtccattgaggactatgaaaagtcccttgacgcttctgcacgcctggccgcctaa

SEQ ID NO: 182 - DNA, 1416 bp, Artificial Sequence
  TaHPPD1m-F372A-02 Nucleotide Sequence
atgatgaatgctcatgctaatttggctttggctgctttggcttttcctgctcatatgcctaattctaagtcttctcatattagatctagaagaactagaagacctttgttgcctttgactatggctgctcatcctcctattagaactaatattggaatgtctactcatggatctgcttctggaggaggagaacaagctggaatttcttctactgatagatttagaatgattgattttcatcatgttgaattttggtgtgctgatgctgcttctgctgctgctagattttcttttggattgggagttcctttggctgctgaatctggattgtctactggaaatactgctcatgcttctcatttgttgcattctagatctggatctttggctttgttgttttctgctccttatgctcaaggagatgctgttactgcttctgttccttcttttgatgctgatgctgctagaagatttactgctgatcatggattggctgttagagctatggctgttagagttcctgatgctggagaagcttttagaacttctgttgatgctggagctagaccttcttttgctcctgctgaattgggacatggatttgaattggctgaagttcaattgtatggagatgttgttttgagatttgtttctcatcctgatgatactgctattccttttttgcctggatttggatctgttccttcttctggagctactcctgattatggattgactagatttgatcatattgttggagatgttcctcatttggctcctgttgctgcttatattgctggatttactggatttcatgaattttctagatttactgctgatcaagttggaactgctgaatcttctttgaatgttgttgttttggctaataattctgaaaatgttttgttgactgttgttgaacctgttcatggaactaagagaagatctcaagttcaaacttatttggatcatcatggaggacctggagttcaacatttggctatggcttctaatgatgttttgggaactttgagaaagattagaggaagatctactatgggaggatttgaattgttgcctcctcctcctgcttcttattatgatgatgttagaagaagagctggagatgttttgtctgaagctcaaattaagggatgtcaagaattgggagttagagttgataaggatgatcatggaggagttgttttgcaaattgctactaaggctgctggagatagacctactttgttgttggaatttattcaaagaattggatgtatggataaggatgaaaatggacaagaatatcaaagaggaggatgtggaggatttggacaaggaaatgttactgaattgtttaagtctattgaagattatgaaaagtctttggatgcttctgctagattggctgcttga

SEQ ID NO: 183 - protein, 436 aa, Triticum aestivum
  TaHPPD2 Amino Acid Sequence
MPPTPTTPAATGAGAAAAVTPEHARPRRMVRFNPRSDRFHTLSFHHVEFWCADAASAAGRFAFALGAPLAARSDLSTGNSVHASQLLRSGNLAFLFTAPYANGCDAATASLPSFSADAARRFSADHGLAVRSIALRVADAAEAFRASVDGGARPAFSPVDLGRGFGFAEVELYGDVVLRFVSHPDDTDVPFLPGFEGVSNPDAVDYGLTRFDHVVGNVPELAPAAAYVAGFAGFHEFAEFTTEDVGTAESGLNSMVLANNSEGVLLPLNEPVHGTKRRSQIQTFLEHHGGSGVQHIAVASSDVLRTLREMRARSAMGGFDFLPPRCRKYYEGVRRIAGDVLSEAQIKECQELGVLVDRDDQGVLLQIFTKPVGDRPTLFLEMIQRIGCMEKDERGEEYQKGGCGGFGKGNFSELFKSIEDYEKSLEAKQSAAVQGS

SEQ ID NO: 184 - DNA, 1311 bp, Triticum aestivum
  TaHPPD2-01 Nucleotide Sequence
atgccgcccacccccaccacccccgcagccaccggcgccggcgctgccgccgcggtgacgccggagcacgcgcggccgcgccgaatggtccgcttcaacccgcgcagcgaccgcttccacacgctctccttccaccacgtcgagttctggtgcgcggacgccgcctccgccgccggccgcttcgccttcgcgctcggcgcgccgctcgccgccaggtccgacctctccacggggaactccgtgcacgcctcccagctgctccgctcgggcaacctcgccttcctcttcaccgcgccctacgcgaacggctgcgacgccgccaccgcctccctgccctccttctccgccgacgccgcgcgccggttctccgcggaccacgggctcgcagtgcgctccatagcactgcgcgtcgcagacgccgcagaggccttccgcgccagcgtcgacggaggcgcgcgcccggccttcagccccgtggacctcggccgcggcttcggcttcgcggaggtcgagctctacggcgacgtcgtgctccgcttcgtcagtcacccggatgacacggacgtgcccttcttgccggggttcgagggcgtgagcaacccggatgccgtggactacggcctgacgcggttcgaccacgtcgtcggcaacgtcccggagcttgcccccgccgccgcatacgtcgccgggttcgcggggttccacgagttcgccgagttcacgacggaggacgtgggcacggccgagagcgggctcaactcgatggtgctcgccaacaactcggagggcgtgctgctgccgctcaacgagccggtgcacggcaccaagcgccggagccagatacagacgttcctggaacaccacggcggctcgggcgtgcagcacatcgcggtggccagcagcgacgtgctcaggacgctcagggagatgcgtgcgcgctccgccatgggcggcttcgacttcctgccaccccgctgccgaaagtactacgaaggcgtgcggcgcatcgccggggatgtgctctcggaggcgcagatcaaggaatgccaggagctgggggtgctcgtcgacagggacgaccaaggggtgttgctacaaatcttcacaaagccagtgggggacaggccaacgctgttcctggagatgatccaaaggatcgggtgcatggagaaggacgagagaggggaagagtaccagaagggtggctgcggcgggttcggcaaaggcaacttctccgagctgttcaagtccattgaagattacgagaagtcccttgaagccaagcaatctgctgcagttcagggatcatag

SEQ ID NO: 185 - DNA, 1311 bp, Artificial Sequence
  TaHPPD2-02 Nucleotide Sequence
atgcctcctactcctactactcctgctgctactggagctggagctgctgctgctgttactcctgaacatgctagacctagaagaatggttagatttaatcctagatctgatagatttcatactttgtcttttcatcatgttgaattttggtgtgctgatgctgcttctgctgctggaagatttgcttttgctttgggagctcctttggctgctagatctgatttgtctactggaaattctgttcatgcttctcaattgttgagatctggaaatttggcttttttgtttactgctccttatgctaatggatgtgatgctgctactgcttctttgccttctttttctgctgatgctgctagaagattttctgctgatcatggattggctgttagatctattgctttgagagttgctgatgctgctgaagcttttagagcttctgttgatggaggagctagacctgctttttctcctgttgatttgggaagaggatttggatttgctgaagttgaattgtatggagatgttgttttgagatttgtttctcatcctgatgatactgatgttccttttttgcctggatttgaaggagtttctaatcctgatgctgttgattatggattgactagatttgatcatgttgttggaaatgttcctgaattggctcctgctgctgcttatgttgctggatttgctggatttcatgaatttgctgaatttactactgaagatgttggaactgctgaatctggattgaattctatggttttggctaataattctgaaggagttttgttgcctttgaatgaacctgttcatggaactaagagaagatctcaaattcaaacttttttggaacatcatggaggatctggagttcaacatattgctgttgcttcttctgatgttttgagaactttgagagaaatgagagctagatctgctatgggaggatttgattttttgcctcctagatgtagaaagtattatgaaggagttagaagaattgctggagatgttttgtctgaagctcaaattaaggaatgtcaagaattgggagttttggttgatagagatgatcaaggagttttgttgcaaatttttactaagcctgttggagatagacctactttgtttttggaaatgattcaaagaattggatgtatggaaaaggatgaaagaggagaagaatatcaaaagggaggatgtggaggatttggaaagggaaatttttctgaattgtttaagtctattgaagattatgaaaagtctttggaagctaagcaatctgctgctgttcaaggatcttga

SEQ ID NO: 186 - protein, 436 aa, Artificial Sequence
  TaHPPD2m-F372A Amino Acid Sequence
MPPTPTTPAATGAGAAAAVTPEHARPRRMVRFNPRSDRFHTLSFHHVEFWCADAASAAGRFAFALGAPLAARSDLSTGNSVHASQLLRSGNLAFLFTAPYANGCDAATASLPSFSADAARRFSADHGLAVRSIALRVADAAEAFRASVDGGARPAFSPVDLGRGFGFAEVELYGDVVLRFVSHPDDTDVPFLPGFEGVSNPDAVDYGLTRFDHVVGNVPELAPAAAYVAGFAGFHEFAEFTTEDVGTAESGLNSMVLANNSEGVLLPLNEPVHGTKRRSQIQTFLEHHGGSGVQHIAVASSDVLRTLREMRARSAMGGFDFLPPRCRKYYEGVRRIAGDVLSEAQIKECQELGVLVDRDDQGVLLQIATKPVGDRPTLFLEMIQRIGCMEKDERGEEYQKGGCGGFGKGNFSELFKSIEDYEKSLEAKQSAAVQGS

SEQ ID NO: 187 - DNA, 1311 bp, Artificial Sequence
  TaHPPD2m-F372A-01 Nucleotide Sequence
atgccgcccacccccaccacccccgcagccaccggcgccggcgctgccgccgcggtgacgccggagcacgcgcggccgcgccgaatggtccgcttcaacccgcgcagcgaccgcttccacacgctctccttccaccacgtcgagttctggtgcgcggacgccgcctccgccgccggccgcttcgccttcgcgctcggcgcgccgctcgccgccaggtccgacctctccacggggaactccgtgcacgcctcccagctgctccgctcgggcaacctcgccttcctcttcaccgcgccctacgcgaacggctgcgacgccgccaccgcctccctgccctccttctccgccgacgccgcgcgccggttctccgcggaccacgggctcgcagtgcgctccatagcactgcgcgtcgcagacgccgcagaggccttccgcgccagcgtcgacggaggcgcgcgcccggccttcagccccgtggacctcggccgcggcttcggcttcgcggaggtcgagctctacggcgacgtcgtgctccgcttcgtcagtcacccggatgacacggacgtgcccttcttgccggggttcgagggcgtgagcaacccggatgccgtggactacggcctgacgcggttcgaccacgtcgtcggcaacgtcccggagcttgcccccgccgccgcatacgtcgccgggttcgcggggttccacgagttcgccgagttcacgacggaggacgtgggcacggccgagagcgggctcaactcgatggtgctcgccaacaactcggagggcgtgctgctgccgctcaacgagccggtgcacggcaccaagcgccggagccagatacagacgttcctggaacaccacggcggctcgggcgtgcagcacatcgcggtggccagcagcgacgtgctcaggacgctcagggagatgcgtgcgcgctccgccatgggcggcttcgacttcctgccaccccgctgccgaaagtactacgaaggcgtgcggcgcatcgccggggatgtgctctcggaggcgcagatcaaggaatgccaggagctgggggtgctcgtcgacagggacgaccaaggggtgttgctacaaatcgctacaaagccagtgggggacaggccaacgctgttcctggagatgatccaaaggatcgggtgcatggagaaggacgagagaggggaagagtaccagaagggtggctgcggcgggttcggcaaaggcaacttctccgagctgttcaagtccattgaagattacgagaagtcccttgaagccaagcaatctgctgcagttcagggatcatag

SEQ ID NO: 188 - DNA, 1311 bp, Artificial Sequence
  TaHPPD2m-F372A-02 Nucleotide Sequence
atgcctcctactcctactactcctgctgctactggagctggagctgctgctgctgttactcctgaacatgctagacctagaagaatggttagatttaatcctagatctgatagatttcatactttgtcttttcatcatgttgaattttggtgtgctgatgctgcttctgctgctggaagatttgcttttgctttgggagctcctttggctgctagatctgatttgtctactggaaattctgttcatgcttctcaattgttgagatctggaaatttggcttttttgtttactgctccttatgctaatggatgtgatgctgctactgcttctttgccttctttttctgctgatgctgctagaagattttctgctgatcatggattggctgttagatctattgctttgagagttgctgatgctgctgaagcttttagagcttctgttgatggaggagctagacctgctttttctcctgttgatttgggaagaggatttggatttgctgaagttgaattgtatggagatgttgttttgagatttgtttctcatcctgatgatactgatgttccttttttgcctggatttgaaggagtttctaatcctgatgctgttgattatggattgactagatttgatcatgttgttggaaatgttcctgaattggctcctgctgctgcttatgttgctggatttgctggatttcatgaatttgctgaatttactactgaagatgttggaactgctgaatctggattgaattctatggttttggctaataattctgaaggagttttgttgcctttgaatgaacctgttcatggaactaagagaagatctcaaattcaaacttttttggaacatcatggaggatctggagttcaacatattgctgttgcttcttctgatgttttgagaactttgagagaaatgagagctagatctgctatgggaggatttgattttttgcctcctagatgtagaaagtattatgaaggagttagaagaattgctggagatgttttgtctgaagctcaaattaaggaatgtcaagaattgggagttttggttgatagagatgatcaaggagttttgttgcaaattgctactaagcctgttggagatagacctactttgtttttggaaatgattcaaagaattggatgtatggaaaaggatgaaagaggagaagaatatcaaaagggaggatgtggaggatttggaaagggaaatttttctgaattgtttaagtctattgaagattatgaaaagtctttggaagctaagcaatctgctgctgttcaaggatcttga

SEQ ID NO: 189 - protein, 436 aa, Triticum aestivum
  TaHPPD3 Amino Acid Sequence
MPPTPTTPAATGAAAAAAVTPEHARPRRMVRFNPRSDRFHTLAFHHVEFWCADAASAAGRFAFALGAPLAARSDLSTGNSVHASQLLRSGNLAFLFTAPYANGCDAATASLPSFSADAARRFSADHGLAVRSIALRVADAAEAFRASVDGGARPAFSPVDLGRGFGFAEVELYGDVVLRFVSHPDDTDVPFLPGFEGVSNPDAVDYGLTRFDHVVGNVPELAPAAAYVAGFAGFHEFAEFTTEDVGTAESGLNSMVLANNSEGVLLPLNEPVHGTKRRSQIQTFLEHHGGPGVQHIAVASSDVLRTLREMRARSAMGGFDFLPPPLPKYYEGVRRIAGDVLSEAQIKECQELGVLVDRDDQGVLLQIFTKPVGDRPTLFLEMIQRIGCMEKDERGEEYQKGGCGGFGKGNFSELFKSIEDYEKSLEAKQSAAVQAS

SEQ ID NO: 190 - DNA, 1311 bp, Triticum aestivum
  TaHPPD3-01 Nucleotide Sequence
atgccgcccacccccaccaccccggcagctaccggcgccgccgccgccgccgcggtgacgccggagcatgcacggccacgtagaatggtccgcttcaacccgcggagcgaccgcttccacacgctcgccttccaccacgtcgagttctggtgcgcggacgccgcctccgccgccggccgcttcgccttcgcgctcggcgcgccgctcgccgccaggtccgacctctccacggggaactccgtgcacgcctcccagctgctccgctcgggcaacctcgccttcctcttcaccgcgccctacgcgaacggctgcgacgccgccaccgcctccctgccctccttctccgccgacgccgcgcgccggttctccgcggaccacgggctcgcagtgcgctccatagcactgcgcgtcgcagacgccgcagaggccttccgcgccagcgtcgacggaggcgcgcgcccggccttcagccccgtggacctcggccgcggcttcggcttcgcggaggtcgagctctacggcgacgtcgtgctccgcttcgtcagtcacccggatgacacggacgtgcccttcttgccggggttcgagggcgtgagcaacccggatgccgtggactacggcctgacgcggttcgaccacgtcgtcggcaacgtcccggagcttgcccccgccgccgcatacgtcgccgggttcgcggggttccacgagttcgccgagttcacgacggaggacgtgggcacggccgagagcgggctcaactcgatggtgctcgccaacaactccgagggcgtgctgctgccgctcaacgagccggtgcacggcaccaagcgccggagccagatacagacgttcctggaacaccacggtggcccgggcgtgcagcacatcgcggtggccagcagcgacgtgctcaggacgctcagggagatgcgtgcgcgctccgccatgggcggcttcgacttcctgccacccccgctgccgaagtactatgaaggcgtgcggcgcatcgcgggggatgtgctctcggaggcgcagatcaaggaatgccaggagctgggggtgctcgtcgacagggacgaccaaggggtgttgctccaaatcttcaccaagccagtgggggacaggccaacgctgttcctggagatgatccaaaggatcgggtgcatggagaaggacgagagaggggaagagtaccagaagggtggctgcggcgggtttggcaaaggcaacttctccgagctgttcaagtccattgaggattatgagaaatcccttgaagccaagcaatctgctgcagttcaggcatcatag

SEQ ID NO: 191 - DNA, 1311 bp, Triticum aestivum
  TaHPPD3-02 Nucleotide Sequence
atgcctcctactcctactactcctgctgctactggagctgctgctgctgctgctgttactcctgaacatgctagacctagaagaatggttagatttaatcctagatctgatagatttcatactttggcttttcatcatgttgaattttggtgtgctgatgctgcttctgctgctggaagatttgcttttgctttgggagctcctttggctgctagatctgatttgtctactggaaattctgttcatgcttctcaattgttgagatctggaaatttggcttttttgtttactgctccttatgctaatggatgtgatgctgctactgcttctttgccttctttttctgctgatgctgctagaagattttctgctgatcatggattggctgttagatctattgctttgagagttgctgatgctgctgaagcttttagagcttctgttgatggaggagctagacctgctttttctcctgttgatttgggaagaggatttggatttgctgaagttgaattgtatggagatgttgttttgagatttgtttctcatcctgatgatactgatgttccttttttgcctggatttgaaggagtttctaatcctgatgctgttgattatggattgactagatttgatcatgttgttggaaatgttcctgaattggctcctgctgctgcttatgttgctggatttgctggatttcatgaatttgctgaatttactactgaagatgttggaactgctgaatctggattgaattctatggttttggctaataattctgaaggagttttgttgcctttgaatgaacctgttcatggaactaagagaagatctcaaattcaaacttttttggaacatcatggaggacctggagttcaacatattgctgttgcttcttctgatgttttgagaactttgagagaaatgagagctagatctgctatgggaggatttgattttttgcctcctcctttgcctaagtattatgaaggagttagaagaattgctggagatgttttgtctgaagctcaaattaaggaatgtcaagaattgggagttttggttgatagagatgatcaaggagttttgttgcaaatttttactaagcctgttggagatagacctactttgtttttggaaatgattcaaagaattggatgtatggaaaaggatgaaagaggagaagaatatcaaaagggaggatgtggaggatttggaaagggaaatttttctgaattgtttaagtctattgaagattatgaaaagtctttggaagctaagcaatctgctgctgttcaagcttcttga

SEQ ID NO: 192 - protein, 436 aa, Artificial Sequence
  TaHPPD3m-F372A Amino Acid Sequence
MPPTPTTPAATGAAAAAAVTPEHARPRRMVRFNPRSDRFHTLAFHHVEFWCADAASAAGRFAFALGAPLAARSDLSTGNSVHASQLLRSGNLAFLFTAPYANGCDAATASLPSFSADAARRFSADHGLAVRSIALRVADAAEAFRASVDGGARPAFSPVDLGRGFGFAEVELYGDVVLRFVSHPDDTDVPFLPGFEGVSNPDAVDYGLTRFDHVVGNVPELAPAAAYVAGFAGFHEFAEFTTEDVGTAESGLNSMVLANNSEGVLLPLNEPVHGTKRRSQIQTFLEHHGGPGVQHIAVASSDVLRTLREMRARSAMGGFDFLPPPLPKYYEGVRRIAGDVLSEAQIKECQELGVLVDRDDQGVLLQIATKPVGDRPTLFLEMIQRIGCMEKDERGEEYQKGGCGGFGKGNFSELFKSIEDYEKSLEAKQSAAVQAS

SEQ ID NO: 193 - DNA, 1311 bp, Artificial Sequence
  TaHPPD3m-F372A-01 Nucleotide Sequence
atgccgcccacccccaccaccccggcagctaccggcgccgccgccgccgccgcggtgacgccggagcatgcacggccacgtagaatggtccgcttcaacccgcggagcgaccgcttccacacgctcgccttccaccacgtcgagttctggtgcgcggacgccgcctccgccgccggccgcttcgccttcgcgctcggcgcgccgctcgccgccaggtccgacctctccacggggaactccgtgcacgcctcccagctgctccgctcgggcaacctcgccttcctcttcaccgcgccctacgcgaacggctgcgacgccgccaccgcctccctgccctccttctccgccgacgccgcgcgccggttctccgcggaccacgggctcgcagtgcgctccatagcactgcgcgtcgcagacgccgcagaggccttccgcgccagcgtcgacggaggcgcgcgcccggccttcagccccgtggacctcggccgcggcttcggcttcgcggaggtcgagctctacggcgacgtcgtgctccgcttcgtcagtcacccggatgacacggacgtgcccttcttgccggggttcgagggcgtgagcaacccggatgccgtggactacggcctgacgcggttcgaccacgtcgtcggcaacgtcccggagcttgcccccgccgccgcatacgtcgccgggttcgcggggttccacgagttcgccgagttcacgacggaggacgtgggcacggccgagagcgggctcaactcgatggtgctcgccaacaactccgagggcgtgctgctgccgctcaacgagccggtgcacggcaccaagcgccggagccagatacagacgttcctggaacaccacggtggcccgggcgtgcagcacatcgcggtggccagcagcgacgtgctcaggacgctcagggagatgcgtgcgcgctccgccatgggcggcttcgacttcctgccacccccgctgccgaagtactatgaaggcgtgcggcgcatcgcgggggatgtgctctcggaggcgcagatcaaggaatgccaggagctgggggtgctcgtcgacagggacgaccaaggggtgttgctccaaatcgctaccaagccagtgggggacaggccaacgctgttcctggagatgatccaaaggatcgggtgcatggagaaggacgagagaggggaagagtaccagaagggtggctgcggcgggtttggcaaaggcaacttctccgagctgttcaagtccattgaggattatgagaaatcccttgaagccaagcaatctgctgcagttcaggcatcatag

SEQ ID NO: 194 - DNA, 1311 bp, Artificial Sequence
  TaHPPD3m-F372A-02 Nucleotide Sequence
atgcctcctactcctactactcctgctgctactggagctgctgctgctgctgctgttactcctgaacatgctagacctagaagaatggttagatttaatcctagatctgatagatttcatactttggcttttcatcatgttgaattttggtgtgctgatgctgcttctgctgctggaagatttgcttttgctttgggagctcctttggctgctagatctgatttgtctactggaaattctgttcatgcttctcaattgttgagatctggaaatttggcttttttgtttactgctccttatgctaatggatgtgatgctgctactgcttctttgccttctttttctgctgatgctgctagaagattttctgctgatcatggattggctgttagatctattgctttgagagttgctgatgctgctgaagcttttagagcttctgttgatggaggagctagacctgctttttctcctgttgatttgggaagaggatttggatttgctgaagttgaattgtatggagatgttgttttgagatttgtttctcatcctgatgatactgatgttccttttttgcctggatttgaaggagtttctaatcctgatgctgttgattatggattgactagatttgatcatgttgttggaaatgttcctgaattggctcctgctgctgcttatgttgctggatttgctggatttcatgaatttgctgaatttactactgaagatgttggaactgctgaatctggattgaattctatggttttggctaataattctgaaggagttttgttgcctttgaatgaacctgttcatggaactaagagaagatctcaaattcaaacttttttggaacatcatggaggacctggagttcaacatattgctgttgcttcttctgatgttttgagaactttgagagaaatgagagctagatctgctatgggaggatttgattttttgcctcctcctttgcctaagtattatgaaggagttagaagaattgctggagatgttttgtctgaagctcaaattaaggaatgtcaagaattgggagttttggttgatagagatgatcaaggagttttgttgcaaattgctactaagcctgttggagatagacctactttgtttttggaaatgattcaaagaattggatgtatggaaaaggatgaaagaggagaagaatatcaaaagggaggatgtggaggatttggaaagggaaatttttctgaattgtttaagtctattgaagattatgaaaagtctttggaagctaagcaatctgctgctgttcaagcttcttga

SEQ ID NO: 195 - protein, 433 aa, Triticum aestivum
  TaHPPD4 Amino Acid Sequence
MPPTPTTPAATGAAAVTPEHARPRRMVRFNPRSDRFHTLAFHHVEFWCADAASAAGRFAFALGAPLAARSDLSTGNSVHASQLLRSGNLAFLFTAPYANGCDAATASLPSFSADAARQFSADHGLAVRSIALRVADAAEAFRASVDGGARPAFSPVDLGRGFGFAEVELYGDVVLRFVSHPDGRDVPFLPGFEGVSNPDAVDYGLTRFDHVVGNVPELAPAAAYVAGFTGFHEFAEFTTEDVGTAESGLNSMVLANNSEGVLLPLNEPVHGTKRRSQIQTFLEHHGGSGVQHIAVASSDVLRTLREMRARSAMGGFDFLPPPLPKYYEGVRRIAGDVLSEAQIKECQELGVLVDRDDQGVLLQIFTKPVGDRPTLFLEMIQRIGCMEKDERGEEYQKGGCGGFGKGNFSELFKSIEDYEKSLEAKQSAAVQGS

SEQ ID NO: 196 - DNA, 1302 bp, Triticum aestivum
  TaHPPD4-01 Nucleotide Sequence
atgccgcccacccccaccacccccgcagccaccggcgccgccgcggtgacgccggagcacgcgcggccgcgccgaatggtccgcttcaacccgcgcagcgaccgcttccacacgctcgccttccaccacgtcgagttctggtgcgcggacgccgcctccgccgccggccgcttcgccttcgcgctcggcgcgccgctcgccgccaggtccgacctctccacggggaactccgtgcacgcctcccagctgctccgctcgggcaacctcgccttcctcttcacggccccctacgccaacggctgcgacgccgccaccgcctccctgccctccttctccgccgacgccgcgcgccagttctccgcggaccacggcctcgcggtgcgctccatagcgctgcgcgtcgcggacgctgccgaggccttccgcgccagcgtcgacgggggcgcgcgcccggccttcagccctgtggacctcggccgcggcttcggcttcgcggaggtcgagctctacggcgacgtcgtgctccgcttcgtcagccacccggacggcagggacgtgcccttcttgccggggttcgagggcgtgagcaacccagacgccgtggactacggcctgacgcggttcgaccacgtcgtcggcaacgtcccggagcttgcccccgccgcggcctacgtcgccgggttcacggggttccacgagttcgccgagttcacgacggaggacgtgggcacggccgagagcgggctcaactcgatggtgctcgccaacaactcggagggcgtgctgctgccgctcaacgagccggtgcacggcaccaagcgccggagccagatacagacgttcctggaacaccacggcggctcgggcgtgcagcacatcgcggtggccagcagcgacgtgctcaggacgctcagggagatgcgtgcgcgctccgccatgggcggcttcgacttcctgccacccccgctgccgaagtactacgaaggcgtgcggcgcatcgccggggatgtgctctcggaggcgcagatcaaggaatgccaggagctgggggtgctcgtcgacagggacgaccaaggggtgttgctacaaatcttcaccaagccagtaggggacaggccgacgttgttcctggagatgatccagaggatcgggtgcatggagaaggacgagagaggggaagagtaccagaagggtggctgcggcgggttcggcaaaggcaacttctccgagctgttcaagtccattgaagattacgagaagtcccttgaagccaagcaatctgctgcagttcagggatcatag

SEQ ID NO: 197 - DNA, 1302 bp, Artificial Sequence
  TaHPPD4-02 Nucleotide Sequence
atgcctcctactcctactactcctgctgctactggagctgctgctgttactcctgaacatgctagacctagaagaatggttagatttaatcctagatctgatagatttcatactttggcttttcatcatgttgaattttggtgtgctgatgctgcttctgctgctggaagatttgcttttgctttgggagctcctttggctgctagatctgatttgtctactggaaattctgttcatgcttctcaattgttgagatctggaaatttggcttttttgtttactgctccttatgctaatggatgtgatgctgctactgcttctttgccttctttttctgctgatgctgctagacaattttctgctgatcatggattggctgttagatctattgctttgagagttgctgatgctgctgaagcttttagagcttctgttgatggaggagctagacctgctttttctcctgttgatttgggaagaggatttggatttgctgaagttgaattgtatggagatgttgttttgagatttgtttctcatcctgatggaagagatgttccttttttgcctggatttgaaggagtttctaatcctgatgctgttgattatggattgactagatttgatcatgttgttggaaatgttcctgaattggctcctgctgctgcttatgttgctggatttactggatttcatgaatttgctgaatttactactgaagatgttggaactgctgaatctggattgaattctatggttttggctaataattctgaaggagttttgttgcctttgaatgaacctgttcatggaactaagagaagatctcaaattcaaacttttttggaacatcatggaggatctggagttcaacatattgctgttgcttcttctgatgttttgagaactttgagagaaatgagagctagatctgctatgggaggatttgattttttgcctcctcctttgcctaagtattatgaaggagttagaagaattgctggagatgttttgtctgaagctcaaattaaggaatgtcaagaattgggagttttggttgatagagatgatcaaggagttttgttgcaaatttttactaagcctgttggagatagacctactttgtttttggaaatgattcaaagaattggatgtatggaaaaggatgaaagaggagaagaatatcaaaagggaggatgtggaggatttggaaagggaaatttttctgaattgtttaagtctattgaagattatgaaaagtctttggaagctaagcaatctgctgctgttcaaggatcttga

SEQ ID NO: 198 - protein, 433 aa, Artificial Sequence
  TaHPPD4m-F372A Amino Acid Sequence
MPPTPTTPAATGAAAVTPEHARPRRMVRFNPRSDRFHTLAFHHVEFWCADAASAAGRFAFALGAPLAARSDLSTGNSVHASQLLRSGNLAFLFTAPYANGCDAATASLPSFSADAARQFSADHGLAVRSIALRVADAAEAFRASVDGGARPAFSPVDLGRGFGFAEVELYGDVVLRFVSHPDGRDVPFLPGFEGVSNPDAVDYGLTRFDHVVGNVPELAPAAAYVAGFTGFHEFAEFTTEDVGTAESGLNSMVLANNSEGVLLPLNEPVHGTKRRSQIQTFLEHHGGSGVQHIAVASSDVLRTLREMRARSAMGGFDFLPPPLPKYYEGVRRIAGDVLSEAQIKECQELGVLVDRDDQGVLLQIATKPVGDRPTLFLEMIQRIGCMEKDERGEEYQKGGCGGFGKGNFSELFKSIEDYEKSLEAKQSAAVQGS

SEQ ID NO: 199 - DNA, 1302 bp, Artificial Sequence
  TaHPPD4m-F372A-01 Nucleotide Sequence
atgccgcccacccccaccacccccgcagccaccggcgccgccgcggtgacgccggagcacgcgcggccgcgccgaatggtccgcttcaacccgcgcagcgaccgcttccacacgctcgccttccaccacgtcgagttctggtgcgcggacgccgcctccgccgccggccgcttcgccttcgcgctcggcgcgccgctcgccgccaggtccgacctctccacggggaactccgtgcacgcctcccagctgctccgctcgggcaacctcgccttcctcttcacggccccctacgccaacggctgcgacgccgccaccgcctccctgccctccttctccgccgacgccgcgcgccagttctccgcggaccacggcctcgcggtgcgctccatagcgctgcgcgtcgcggacgctgccgaggccttccgcgccagcgtcgacgggggcgcgcgcccggccttcagccctgtggacctcggccgcggcttcggcttcgcggaggtcgagctctacggcgacgtcgtgctccgcttcgtcagccacccggacggcagggacgtgcccttcttgccggggttcgagggcgtgagcaacccagacgccgtggactacggcctgacgcggttcgaccacgtcgtcggcaacgtcccggagcttgcccccgccgcggcctacgtcgccgggttcacggggttccacgagttcgccgagttcacgacggaggacgtgggcacggccgagagcgggctcaactcgatggtgctcgccaacaactcggagggcgtgctgctgccgctcaacgagccggtgcacggcaccaagcgccggagccagatacagacgttcctggaacaccacggcggctcgggcgtgcagcacatcgcggtggccagcagcgacgtgctcaggacgctcagggagatgcgtgcgcgctccgccatgggcggcttcgacttcctgccacccccgctgccgaagtactacgaaggcgtgcggcgcatcgccggggatgtgctctcggaggcgcagatcaaggaatgccaggagctgggggtgctcgtcgacagggacgaccaaggggtgttgctacaaatcgctaccaagccagtaggggacaggccgacgttgttcctggagatgatccagaggatcgggtgcatggagaaggacgagagaggggaagagtaccagaagggtggctgcggcgggttcggcaaaggcaacttctccgagctgttcaagtccattgaagattacgagaagtcccttgaagccaagcaatctgctgcagttcagggatcatag

SEQ ID NO: 200 - DNA, 1302 bp, Artificial Sequence
  TaHPPD4m-F372A-02 Nucleotide Sequence
atgcctcctactcctactactcctgctgctactggagctgctgctgttactcctgaacatgctagacctagaagaatggttagatttaatcctagatctgatagatttcatactttggcttttcatcatgttgaattttggtgtgctgatgctgcttctgctgctggaagatttgcttttgctttgggagctcctttggctgctagatctgatttgtctactggaaattctgttcatgcttctcaattgttgagatctggaaatttggcttttttgtttactgctccttatgctaatggatgtgatgctgctactgcttctttgccttctttttctgctgatgctgctagacaattttctgctgatcatggattggctgttagatctattgctttgagagttgctgatgctgctgaagcttttagagcttctgttgatggaggagctagacctgctttttctcctgttgatttgggaagaggatttggatttgctgaagttgaattgtatggagatgttgttttgagatttgtttctcatcctgatggaagagatgttccttttttgcctggatttgaaggagtttctaatcctgatgctgttgattatggattgactagatttgatcatgttgttggaaatgttcctgaattggctcctgctgctgcttatgttgctggatttactggatttcatgaatttgctgaatttactactgaagatgttggaactgctgaatctggattgaattctatggttttggctaataattctgaaggagttttgttgcctttgaatgaacctgttcatggaactaagagaagatctcaaattcaaacttttttggaacatcatggaggatctggagttcaacatattgctgttgcttcttctgatgttttgagaactttgagagaaatgagagctagatctgctatgggaggatttgattttttgcctcctcctttgcctaagtattatgaaggagttagaagaattgctggagatgttttgtctgaagctcaaattaaggaatgtcaagaattgggagttttggttgatagagatgatcaaggagttttgttgcaaattgctactaagcctgttggagatagacctactttgtttttggaaatgattcaaagaattggatgtatggaaaaggatgaaagaggagaagaatatcaaaagggaggatgtggaggatttggaaagggaaatttttctgaattgtttaagtctattgaagattatgaaaagtctttggaagctaagcaatctgctgctgttcaaggatcttga

SEQ ID NO: 201 - protein, 413 aa, Triticum aestivum
  TaHPPD5 Amino Acid Sequence
MPPTPTTPAATGAAAVTPEHARPRRMVRFNPRSDRFHTLAFHHVEFWCADAASAAGRFAFALGAPLAARSDLSTGNSVHASQLLRSGNLAFLFTAPYANGCDAATASLPSFSADAARQFSADHGLAVRSIALRVADAAEAFRASVDGGARPAFSPVDLGRGFGFAEVELYGDVVLRFVSHPDGRDVPFLPGFEGVSNPDAVDYGLTRFDHVVGNVPELAPAAAYVAGFTGFHEFAEFTTEDVGTAESGLNSMVLANNSEGVLLPLNEPVHGTKRRSQIQTFLEHHGGSGVQHIAVASSDVLRTLREMRARSAMGGFDFLPPPLPKYYEGVRRIAGDVLSEAQIKECQELGVLVDRDDQGVLLQIFTKPVGDRPTLFLEMIQRIGCMEKDELFKSIEDYEKSLEAKQSAAVQGS

SEQ ID NO: 202 - DNA, 1242 bp, Triticum aestivum
  TaHPPD5-01 Nucleotide Sequence
atgccgcccacccccaccacccccgcagccaccggcgccgccgcggtgacgccggagcacgcgcggccgcgccgaatggtccgcttcaacccgcgcagcgaccgcttccacacgctcgccttccaccacgtcgagttctggtgcgcggacgccgcctccgccgccggccgcttcgccttcgcgctcggcgcgccgctcgccgccaggtccgacctctccacggggaactccgtgcacgcctcccagctgctccgctcgggcaacctcgccttcctcttcacggccccctacgccaacggctgcgacgccgccaccgcctccctgccctccttctccgccgacgccgcgcgccagttctccgcggaccacggcctcgcggtgcgctccatagcgctgcgcgtcgcggacgctgccgaggccttccgcgccagcgtcgacgggggcgcgcgcccggccttcagccctgtggacctcggccgcggcttcggcttcgcggaggtcgagctctacggcgacgtcgtgctccgcttcgtcagccacccggacggcagggacgtgcccttcttgccggggttcgagggcgtgagcaacccagacgccgtggactacggcctgacgcggttcgaccacgtcgtcggcaacgtcccggagcttgcccccgccgcggcctacgtcgccgggttcacggggttccacgagttcgccgagttcacgacggaggacgtgggcacggccgagagcgggctcaactcgatggtgctcgccaacaactcggagggcgtgctgctgccgctcaacgagccggtgcacggcaccaagcgccggagccagatacagacgttcctggaacaccacggcggctcgggcgtgcagcacatcgcggtggccagcagcgacgtgctcaggacgctcagggagatgcgtgcgcgctccgccatgggcggcttcgacttcctgccacccccgctgccgaagtactacgaaggcgtgcggcgcatcgccggggatgtgctctcggaggcgcagatcaaggaatgccaggagctgggggtgctcgtcgacagggacgaccaaggggtgttgctacaaatcttcaccaagccagtaggggacaggccgacgttgttcctggagatgatccagaggatcgggtgcatggagaaggacgagctgttcaagtccattgaagattacgagaagtcccttgaagccaagcaatctgctgcagttcagggatcatag

SEQ ID NO: 203 - DNA, 1242 bp, Artificial Sequence
  TaHPPD5-02 Nucleotide Sequence
atgcctcctactcctactactcctgctgctactggagctgctgctgttactcctgaacatgctagacctagaagaatggttagatttaatcctagatctgatagatttcatactttggcttttcatcatgttgaattttggtgtgctgatgctgcttctgctgctggaagatttgcttttgctttgggagctcctttggctgctagatctgatttgtctactggaaattctgttcatgcttctcaattgttgagatctggaaatttggcttttttgtttactgctccttatgctaatggatgtgatgctgctactgcttctttgccttctttttctgctgatgctgctagacaattttctgctgatcatggattggctgttagatctattgctttgagagttgctgatgctgctgaagcttttagagcttctgttgatggaggagctagacctgctttttctcctgttgatttgggaagaggatttggatttgctgaagttgaattgtatggagatgttgttttgagatttgtttctcatcctgatggaagagatgttccttttttgcctggatttgaaggagtttctaatcctgatgctgttgattatggattgactagatttgatcatgttgttggaaatgttcctgaattggctcctgctgctgcttatgttgctggatttactggatttcatgaatttgctgaatttactactgaagatgttggaactgctgaatctggattgaattctatggttttggctaataattctgaaggagttttgttgcctttgaatgaacctgttcatggaactaagagaagatctcaaattcaaacttttttggaacatcatggaggatctggagttcaacatattgctgttgcttcttctgatgttttgagaactttgagagaaatgagagctagatctgctatgggaggatttgattttttgcctcctcctttgcctaagtattatgaaggagttagaagaattgctggagatgttttgtctgaagctcaaattaaggaatgtcaagaattgggagttttggttgatagagatgatcaaggagttttgttgcaaatttttactaagcctgttggagatagacctactttgtttttggaaatgattcaaagaattggatgtatggaaaaggatgaattgtttaagtctattgaagattatgaaaagtctttggaagctaagcaatctgctgctgttcaaggatcttga

SEQ ID NO: 204 - protein, 413 aa, Artificial Sequence
  TaHPPD5m-F372A Amino Acid Sequence
MPPTPTTPAATGAAAVTPEHARPRRMVRFNPRSDRFHTLAFHHVEFWCADAASAAGRFAFALGAPLAARSDLSTGNSVHASQLLRSGNLAFLFTAPYANGCDAATASLPSFSADAARQFSADHGLAVRSIALRVADAAEAFRASVDGGARPAFSPVDLGRGFGFAEVELYGDVVLRFVSHPDGRDVPFLPGFEGVSNPDAVDYGLTRFDHVVGNVPELAPAAAYVAGFTGFHEFAEFTTEDVGTAESGLNSMVLANNSEGVLLPLNEPVHGTKRRSQIQTFLEHHGGSGVQHIAVASSDVLRTLREMRARSAMGGFDFLPPPLPKYYEGVRRIAGDVLSEAQIKECQELGVLVDRDDQGVLLQIATKPVGDRPTLFLEMIQRIGCMEKDELFKSIEDYEKSLEAKQSAAVQGS

SEQ ID NO: 205 - DNA, 1242 bp, Artificial Sequence
  TaHPPD5m-F372A-01 Nucleotide Sequence
atgccgcccacccccaccacccccgcagccaccggcgccgccgcggtgacgccggagcacgcgcggccgcgccgaatggtccgcttcaacccgcgcagcgaccgcttccacacgctcgccttccaccacgtcgagttctggtgcgcggacgccgcctccgccgccggccgcttcgccttcgcgctcggcgcgccgctcgccgccaggtccgacctctccacggggaactccgtgcacgcctcccagctgctccgctcgggcaacctcgccttcctcttcacggccccctacgccaacggctgcgacgccgccaccgcctccctgccctccttctccgccgacgccgcgcgccagttctccgcggaccacggcctcgcggtgcgctccatagcgctgcgcgtcgcggacgctgccgaggccttccgcgccagcgtcgacgggggcgcgcgcccggccttcagccctgtggacctcggccgcggcttcggcttcgcggaggtcgagctctacggcgacgtcgtgctccgcttcgtcagccacccggacggcagggacgtgcccttcttgccggggttcgagggcgtgagcaacccagacgccgtggactacggcctgacgcggttcgaccacgtcgtcggcaacgtcccggagcttgcccccgccgcggcctacgtcgccgggttcacggggttccacgagttcgccgagttcacgacggaggacgtgggcacggccgagagcgggctcaactcgatggtgctcgccaacaactcggagggcgtgctgctgccgctcaacgagccggtgcacggcaccaagcgccggagccagatacagacgttcctggaacaccacggcggctcgggcgtgcagcacatcgcggtggccagcagcgacgtgctcaggacgctcagggagatgcgtgcgcgctccgccatgggcggcttcgacttcctgccacccccgctgccgaagtactacgaaggcgtgcggcgcatcgccggggatgtgctctcggaggcgcagatcaaggaatgccaggagctgggggtgctcgtcgacagggacgaccaaggggtgttgctacaaatcgctaccaagccagtaggggacaggccgacgttgttcctggagatgatccagaggatcgggtgcatggagaaggacgagctgttcaagtccattgaagattacgagaagtcccttgaagccaagcaatctgctgcagttcagggatcatag

SEQ ID NO: 206 - DNA, 1242 bp, Artificial Sequence
  TaHPPD5m-F372A-02 Nucleotide Sequence
atgcctcctactcctactactcctgctgctactggagctgctgctgttactcctgaacatgctagacctagaagaatggttagatttaatcctagatctgatagatttcatactttggcttttcatcatgttgaattttggtgtgctgatgctgcttctgctgctggaagatttgcttttgctttgggagctcctttggctgctagatctgatttgtctactggaaattctgttcatgcttctcaattgttgagatctggaaatttggcttttttgtttactgctccttatgctaatggatgtgatgctgctactgcttctttgccttctttttctgctgatgctgctagacaattttctgctgatcatggattggctgttagatctattgctttgagagttgctgatgctgctgaagcttttagagcttctgttgatggaggagctagacctgctttttctcctgttgatttgggaagaggatttggatttgctgaagttgaattgtatggagatgttgttttgagatttgtttctcatcctgatggaagagatgttccttttttgcctggatttgaaggagtttctaatcctgatgctgttgattatggattgactagatttgatcatgttgttggaaatgttcctgaattggctcctgctgctgcttatgttgctggatttactggatttcatgaatttgctgaatttactactgaagatgttggaactgctgaatctggattgaattctatggttttggctaataattctgaaggagttttgttgcctttgaatgaacctgttcatggaactaagagaagatctcaaattcaaacttttttggaacatcatggaggatctggagttcaacatattgctgttgcttcttctgatgttttgagaactttgagagaaatgagagctagatctgctatgggaggatttgattttttgcctcctcctttgcctaagtattatgaaggagttagaagaattgctggagatgttttgtctgaagctcaaattaaggaatgtcaagaattgggagttttggttgatagagatgatcaaggagttttgttgcaaattgctactaagcctgttggagatagacctactttgtttttggaaatgattcaaagaattggatgtatggaaaaggatgaattgtttaagtctattgaagattatgaaaagtctttggaagctaagcaatctgctgctgttcaaggatcttga

SEQ ID NO: 207 - protein, 403 aa, Triticum aestivum
  TaHPPD6 Amino Acid Sequence
MVRFNPGSDRFHTLAFHHIEFWCTDAASADGRFAFSLGAPLAARSDLSTGNSTHASQLLRPGSLAFLFTAPYANGCIFSVDAARRFFADHGLAVRSVALRVADAAKAFRASVDGGARPAFAPVDLGRGFGFAEVKLYGDVVLRFVSHPDGTDVPFLPGLFEGVSNPGAVHYGLTRFDHIVGNVPELAPAAAYVAGLTGFHEFAEFTTEDVGTAQSGLNSVVLANTSEGVPLLLNEPVHGTKRRRQIQTFLEHHGGPGVQHIAVASSEVFRTLREMHARSSMGGFDFLPPPLPKYYEGVRRLAGDVLSEAQIKECQELGVLVNRDDQGVLLQIFTKPVGDRPTFFLEMIQRIGCMEKDERGEEYQKGGCGGFGKGNISELFKSIEDYEKSLEAKQSAAVQGSYI

SEQ ID NO: 208 - DNA, 1212 bp, Triticum aestivum
  TaHPPD6-01 Nucleotide Sequence
atggtccgcttcaacccgggcagcgaccgcttccacacgctcgccttccaccacatcgagttctggtgcaccgacgcagcctcggccgacggccgcttcgccttctcgctcggcgcgccgctcgccgccaggtccgacctatccacggggaactccacgcacgcctcccagctgctccgcccaggatccctcgcattcctgttcaccgcgccctatgccaacggctgcatcttctcggtcgacgccgcgcgccggttcttcgctgatcacgggctcgcagtgcgctccgtagcactgcgcgtcgcagacgccgccaaggccttccgcgccagcgtcgacggaggcgcgcgcccggccttcgcccccgtggacctcggccgcggcttcggatttgcggaggtcaagctctacggcgacgtcgtgctgcgcttcgtcagtcacccggatggcacggacgtgcccttcttgccagggttatttgagggcgtgagcaacccgggtgccgtgcactacggcctgacgcggttcgaccacatcgtcggcaacgtcccagagctagcccccgctgccgcctacgttgccggcttgacgggcttccacgaattcgccgagttcaccactgaggacgtcggcacggcccagagcgggctcaactcggtagtgctggccaacacctcggagggcgtgccgctgctgctcaatgaaccggttcacggcaccaagcgccggaggcagatacagacgttcctggaacaccacggtggcccgggcgtgcagcacatcgcggtggccagcagcgaggtgttcaggacgctcagggagatgcatgcgcgctcttccatgggcggctttgacttcctgccaccgccgctgcccaagtactatgaaggcgtgcgacgcctcgccggggatgtgctctcggaggcgcagatcaaggaatgccaggagctgggggtgctcgtcaacagggacgaccaaggggtgttgctccaaatcttcaccaagccagtgggggacaggccaacgtttttcctggagatgatccaaagaatcgggtgcatggagaaggacgagagaggggaagagtaccagaagggtggctgcggcggtttcggcaagggcaacatctccgagctgttcaagtccattgaagattatgaaaagtcccttgaagccaagcaatctgcagcagttcagggatcatatatatga

SEQ ID NO: 209 - DNA, 1212 bp, Artificial Sequence
  TaHPPD6-02 Nucleotide Sequence
atggttagatttaatcctggatctgatagatttcatactttggcttttcatcatattgaattttggtgtactgatgctgcttctgctgatggaagatttgctttttctttgggagctcctttggctgctagatctgatttgtctactggaaattctactcatgcttctcaattgttgagacctggatctttggcttttttgtttactgctccttatgctaatggatgtattttttctgttgatgctgctagaagattttttgctgatcatggattggctgttagatctgttgctttgagagttgctgatgctgctaaggcttttagagcttctgttgatggaggagctagacctgcttttgctcctgttgatttgggaagaggatttggatttgctgaagttaagttgtatggagatgttgttttgagatttgtttctcatcctgatggaactgatgttccttttttgcctggattgtttgaaggagtttctaatcctggagctgttcattatggattgactagatttgatcatattgttggaaatgttcctgaattggctcctgctgctgcttatgttgctggattgactggatttcatgaatttgctgaatttactactgaagatgttggaactgctcaatctggattgaattctgttgttttggctaatacttctgaaggagttcctttgttgttgaatgaacctgttcatggaactaagagaagaagacaaattcaaacttttttggaacatcatggaggacctggagttcaacatattgctgttgcttcttctgaagtttttagaactttgagagaaatgcatgctagatcttctatgggaggatttgattttttgcctcctcctttgcctaagtattatgaaggagttagaagattggctggagatgttttgtctgaagctcaaattaaggaatgtcaagaattgggagttttggttaatagagatgatcaaggagttttgttgcaaatttttactaagcctgttggagatagacctactttttttttggaaatgattcaaagaattggatgtatggaaaaggatgaaagaggagaagaatatcaaaagggaggatgtggaggatttggaaagggaaatatttctgaattgtttaagtctattgaagattatgaaaagtctttggaagctaagcaatctgctgctgttcaaggatcttatatttga

SEQ ID NO: 210 - protein, 403 aa, Artificial Sequence
  TaHPPD6m-F372A Amino Acid Sequence
MVRFNPGSDRFHTLAFHHIEFWCTDAASADGRFAFSLGAPLAARSDLSTGNSTHASQLLRPGSLAFLFTAPYANGCIFSVDAARRFFADHGLAVRSVALRVADAAKAFRASVDGGARPAFAPVDLGRGFGFAEVKLYGDVVLRFVSHPDGTDVPFLPGLFEGVSNPGAVHYGLTRFDHIVGNVPELAPAAAYVAGLTGFHEFAEFTTEDVGTAQSGLNSVVLANTSEGVPLLLNEPVHGTKRRRQIQTFLEHHGGPGVQHIAVASSEVFRTLREMHARSSMGGFDFLPPPLPKYYEGVRRLAGDVLSEAQIKECQELGVLVNRDDQGVLLQIATKPVGDRPTFFLEMIQRIGCMEKDERGEEYQKGGCGGFGKGNISELFKSIEDYEKSLEAKQSAAVQGSYI

SEQ ID NO: 211 - DNA, 1212 bp, Artificial Sequence
  TaHPPD6m-F372A-01 Nucleotide Sequence
atggtccgcttcaacccgggcagcgaccgcttccacacgctcgccttccaccacatcgagttctggtgcaccgacgcagcctcggccgacggccgcttcgccttctcgctcggcgcgccgctcgccgccaggtccgacctatccacggggaactccacgcacgcctcccagctgctccgcccaggatccctcgcattcctgttcaccgcgccctatgccaacggctgcatcttctcggtcgacgccgcgcgccggttcttcgctgatcacgggctcgcagtgcgctccgtagcactgcgcgtcgcagacgccgccaaggccttccgcgccagcgtcgacggaggcgcgcgcccggccttcgcccccgtggacctcggccgcggcttcggatttgcggaggtcaagctctacggcgacgtcgtgctgcgcttcgtcagtcacccggatggcacggacgtgcccttcttgccagggttatttgagggcgtgagcaacccgggtgccgtgcactacggcctgacgcggttcgaccacatcgtcggcaacgtcccagagctagcccccgctgccgcctacgttgccggcttgacgggcttccacgaattcgccgagttcaccactgaggacgtcggcacggcccagagcgggctcaactcggtagtgctggccaacacctcggagggcgtgccgctgctgctcaatgaaccggttcacggcaccaagcgccggaggcagatacagacgttcctggaacaccacggtggcccgggcgtgcagcacatcgcggtggccagcagcgaggtgttcaggacgctcagggagatgcatgcgcgctcttccatgggcggctttgacttcctgccaccgccgctgcccaagtactatgaaggcgtgcgacgcctcgccggggatgtgctctcggaggcgcagatcaaggaatgccaggagctgggggtgctcgtcaacagggacgaccaaggggtgttgctccaaatcgctaccaagccagtgggggacaggccaacgtttttcctggagatgatccaaagaatcgggtgcatggagaaggacgagagaggggaagagtaccagaagggtggctgcggcggtttcggcaagggcaacatctccgagctgttcaagtccattgaagattatgaaaagtcccttgaagccaagcaatctgcagcagttcagggatcatatatatga

SEQ ID NO: 212 - DNA, 1212 bp, Artificial Sequence
  TaHPPD6m-F372A-02 Nucleotide Sequence
atggttagatttaatcctggatctgatagatttcatactttggcttttcatcatattgaattttggtgtactgatgctgcttctgctgatggaagatttgctttttctttgggagctcctttggctgctagatctgatttgtctactggaaattctactcatgcttctcaattgttgagacctggatctttggcttttttgtttactgctccttatgctaatggatgtattttttctgttgatgctgctagaagattttttgctgatcatggattggctgttagatctgttgctttgagagttgctgatgctgctaaggcttttagagcttctgttgatggaggagctagacctgcttttgctcctgttgatttgggaagaggatttggatttgctgaagttaagttgtatggagatgttgttttgagatttgtttctcatcctgatggaactgatgttccttttttgcctggattgtttgaaggagtttctaatcctggagctgttcattatggattgactagatttgatcatattgttggaaatgttcctgaattggctcctgctgctgcttatgttgctggattgactggatttcatgaatttgctgaatttactactgaagatgttggaactgctcaatctggattgaattctgttgttttggctaatacttctgaaggagttcctttgttgttgaatgaacctgttcatggaactaagagaagaagacaaattcaaacttttttggaacatcatggaggacctggagttcaacatattgctgttgcttcttctgaagtttttagaactttgagagaaatgcatgctagatcttctatgggaggatttgattttttgcctcctcctttgcctaagtattatgaaggagttagaagattggctggagatgttttgtctgaagctcaaattaaggaatgtcaagaattgggagttttggttaatagagatgatcaaggagttttgttgcaaattgctactaagcctgttggagatagacctactttttttttggaaatgattcaaagaattggatgtatggaaaaggatgaaagaggagaagaatatcaaaagggaggatgtggaggatttggaaagggaaatatttctgaattgtttaagtctattgaagattatgaaaagtctttggaagctaagcaatctgctgctgttcaaggatcttatatttga

SEQ ID NO: 213 - protein, 381 aa, Triticum aestivum
  TaHPPD7 Amino Acid Sequence
MPPTPTTPAATGAAAAAAVTPEHARPRRMVRFNPRSDRFHTLAFHHVEFWCADAASAAGRFAFALGAPLAARSDLSTGNSVHASQLLRSGNLAFLFTAPYANGCDAATASLPSFSADAARRFSADHGLAVRSIALRVADAAEAFRASVDGGARPAFSPVDLGRGFGFAEVELYGDVVLRFVSHPDGTDVPFLPGFEGVSNPDAVDYGLTRFDHVVGNVPELAPAAAYVAGFTGFHEFAEFTTEDVGTAESGLNSMVLANNSEGVLLPLNEPVHGTKRRSQIQTFLEHHGGPGVQHIAVASSDVLRTLREMRARSAMGGFDFLPPPLPKYYEGVRRIAGDVLSEAQIKECQELGVLVDRDDQGVLLQIFTKPVGDRPTCSWR

SEQ ID NO: 214 - DNA, 1146 bp, Triticum aestivum
  TaHPPD7-01 Nucleotide Sequence
atgccgcccacccccaccacccccgcagccaccggcgccgccgccgccgccgcggtgacgccggagcacgcgcggccgcgccgaatggtccgcttcaacccgcgcagcgaccgcttccacacgctcgccttccaccacgtcgagttctggtgcgcggacgccgcctccgccgccggccgcttcgccttcgcgctcggcgcgccgctcgccgccaggtccgacctctccacggggaactccgtgcacgcctcccagctgctccgctcgggcaacctcgccttcctcttcaccgcgccctacgccaacggctgcgacgccgccaccgcctccctgccctccttctccgccgacgccgcgcgccggttctccgcggaccacgggctcgcggtgcgctccatagcgctgcgcgtcgcggacgccgccgaggccttccgcgccagcgtcgacgggggcgcgcgcccggccttcagccccgtggacctcggccgcggcttcggcttcgcggaggtcgagctctacggcgacgtcgtgctccgcttcgtcagccacccggacggcacggacgtgcccttcttgccggggttcgagggcgtgagcaacccggatgccgtggactacggcctgacgcggttcgaccacgtcgtcggcaacgtcccggagcttgcccccgccgccgcatacgtcgccgggttcacggggttccacgagttcgccgagttcacgacggaggacgtgggcacggccgagagcgggctcaactcgatggtgctcgccaacaactcggagggcgtgctgctgccgctcaacgagccggtgcacggcaccaagcgccggagccagatacagacgttcctggaacaccacggcggcccgggcgtgcagcacatcgcggtggccagcagcgacgtgctcaggacgctcagggagatgcgtgcgcgctccgccatgggcggcttcgacttcctgccacccccgctgccgaagtactacgaaggcgtgcggcgcatcgccggggatgtgctctcggaggcgcagatcaaggaatgccaggagctgggggtgctcgtcgacagggacgaccaaggggtgttgctacaaatcttcaccaagccagtaggggacaggccgacgtgttcctggagatga

SEQ ID NO: 215 - DNA, 1146 bp, Artificial Sequence
  TaHPPD7-02 Nucleotide Sequence
atgcctcctactcctactactcctgctgctactggagctgctgctgctgctgctgttactcctgaacatgctagacctagaagaatggttagatttaatcctagatctgatagatttcatactttggcttttcatcatgttgaattttggtgtgctgatgctgcttctgctgctggaagatttgcttttgctttgggagctcctttggctgctagatctgatttgtctactggaaattctgttcatgcttctcaattgttgagatctggaaatttggcttttttgtttactgctccttatgctaatggatgtgatgctgctactgcttctttgccttctttttctgctgatgctgctagaagattttctgctgatcatggattggctgttagatctattgctttgagagttgctgatgctgctgaagcttttagagcttctgttgatggaggagctagacctgctttttctcctgttgatttgggaagaggatttggatttgctgaagttgaattgtatggagatgttgttttgagatttgtttctcatcctgatggaactgatgttccttttttgcctggatttgaaggagtttctaatcctgatgctgttgattatggattgactagatttgatcatgttgttggaaatgttcctgaattggctcctgctgctgcttatgttgctggatttactggatttcatgaatttgctgaatttactactgaagatgttggaactgctgaatctggattgaattctatggttttggctaataattctgaaggagttttgttgcctttgaatgaacctgttcatggaactaagagaagatctcaaattcaaacttttttggaacatcatggaggacctggagttcaacatattgctgttgcttcttctgatgttttgagaactttgagagaaatgagagctagatctgctatgggaggatttgattttttgcctcctcctttgcctaagtattatgaaggagttagaagaattgctggagatgttttgtctgaagctcaaattaaggaatgtcaagaattgggagttttggttgatagagatgatcaaggagttttgttgcaaatttttactaagcctgttggagatagacctacttgttcttggagatga

SEQ ID NO: 216 - protein, 381 aa, Artificial Sequence
  TaHPPD7m-F372A Amino Acid Sequence
MPPTPTTPAATGAAAAAAVTPEHARPRRMVRFNPRSDRFHTLAFHHVEFWCADAASAAGRFAFALGAPLAARSDLSTGNSVHASQLLRSGNLAFLFTAPYANGCDAATASLPSFSADAARRFSADHGLAVRSIALRVADAAEAFRASVDGGARPAFSPVDLGRGFGFAEVELYGDVVLRFVSHPDGTDVPFLPGFEGVSNPDAVDYGLTRFDHVVGNVPELAPAAAYVAGFTGFHEFAEFTTEDVGTAESGLNSMVLANNSEGVLLPLNEPVHGTKRRSQIQTFLEHHGGPGVQHIAVASSDVLRTLREMRARSAMGGFDFLPPPLPKYYEGVRRIAGDVLSEAQIKECQELGVLVDRDDQGVLLQIATKPVGDRPTCSWR

SEQ ID NO: 217 - DNA, 1146 bp, Artificial Sequence
  TaHPPD7m-F372A-01 Nucleotide Sequence
atgccgcccacccccaccacccccgcagccaccggcgccgccgccgccgccgcggtgacgccggagcacgcgcggccgcgccgaatggtccgcttcaacccgcgcagcgaccgcttccacacgctcgccttccaccacgtcgagttctggtgcgcggacgccgcctccgccgccggccgcttcgccttcgcgctcggcgcgccgctcgccgccaggtccgacctctccacggggaactccgtgcacgcctcccagctgctccgctcgggcaacctcgccttcctcttcaccgcgccctacgccaacggctgcgacgccgccaccgcctccctgccctccttctccgccgacgccgcgcgccggttctccgcggaccacgggctcgcggtgcgctccatagcgctgcgcgtcgcggacgccgccgaggccttccgcgccagcgtcgacgggggcgcgcgcccggccttcagccccgtggacctcggccgcggcttcggcttcgcggaggtcgagctctacggcgacgtcgtgctccgcttcgtcagccacccggacggcacggacgtgcccttcttgccggggttcgagggcgtgagcaacccggatgccgtggactacggcctgacgcggttcgaccacgtcgtcggcaacgtcccggagcttgcccccgccgccgcatacgtcgccgggttcacggggttccacgagttcgccgagttcacgacggaggacgtgggcacggccgagagcgggctcaactcgatggtgctcgccaacaactcggagggcgtgctgctgccgctcaacgagccggtgcacggcaccaagcgccggagccagatacagacgttcctggaacaccacggcggcccgggcgtgcagcacatcgcggtggccagcagcgacgtgctcaggacgctcagggagatgcgtgcgcgctccgccatgggcggcttcgacttcctgccacccccgctgccgaagtactacgaaggcgtgcggcgcatcgccggggatgtgctctcggaggcgcagatcaaggaatgccaggagctgggggtgctcgtcgacagggacgaccaaggggtgttgctacaaatcgctaccaagccagtaggggacaggccgacgtgttcctggagatga

SEQ ID NO: 218 - DNA, 1146 bp, Artificial Sequence
  TaHPPD7m-F372A-02 Nucleotide Sequence
atgcctcctactcctactactcctgctgctactggagctgctgctgctgctgctgttactcctgaacatgctagacctagaagaatggttagatttaatcctagatctgatagatttcatactttggcttttcatcatgttgaattttggtgtgctgatgctgcttctgctgctggaagatttgcttttgctttgggagctcctttggctgctagatctgatttgtctactggaaattctgttcatgcttctcaattgttgagatctggaaatttggcttttttgtttactgctccttatgctaatggatgtgatgctgctactgcttctttgccttctttttctgctgatgctgctagaagattttctgctgatcatggattggctgttagatctattgctttgagagttgctgatgctgctgaagcttttagagcttctgttgatggaggagctagacctgctttttctcctgttgatttgggaagaggatttggatttgctgaagttgaattgtatggagatgttgttttgagatttgtttctcatcctgatggaactgatgttccttttttgcctggatttgaaggagtttctaatcctgatgctgttgattatggattgactagatttgatcatgttgttggaaatgttcctgaattggctcctgctgctgcttatgttgctggatttactggatttcatgaatttgctgaatttactactgaagatgttggaactgctgaatctggattgaattctatggttttggctaataattctgaaggagttttgttgcctttgaatgaacctgttcatggaactaagagaagatctcaaattcaaacttttttggaacatcatggaggacctggagttcaacatattgctgttgcttcttctgatgttttgagaactttgagagaaatgagagctagatctgctatgggaggatttgattttttgcctcctcctttgcctaagtattatgaaggagttagaagaattgctggagatgttttgtctgaagctcaaattaaggaatgtcaagaattgggagttttggttgatagagatgatcaaggagttttgttgcaaattgctactaagcctgttggagatagacctacttgttcttggagatga

SEQ ID NO: 219 - protein, 440 aa, Artificial Sequence
  AsHPPDm-F372G Amino Acid Sequence
MPPTPATATGAAAAAVTPEHAARSFPRVVRVNPRSDRFPVLSFHHVELWCADAASAAGRFSFALGAPLAARSDLSTGNSAHASLLLRSGALAFLFTAPYAPPPQEAATAAATASIPSFSADAARTFAAAHGLAVRSVGVRVADAAEAFRVSVAGGARPAFAPADLGHGFGLAEVELYGDVVLRFVSYPDETDLPFLPGFERVSSPGAVDYGLTRFDHVVGNVPEMAPVIDYMKGFLGFHEFAEFTAEDVGTTESGLNSVVLANNSEAVLLPLNEPVHGTKRRSQIQTYLEYHGGPGVQHIALASNDVLRTLREMRARTPMGGFEFMAPPQAKYYEGVRRIAGDVLSEEQIKECQELGVLVDRDDQGVLLQIGTKPVGDRPTFFLEMIQRIGCMEKDEVGQEYQKGGCGGFGKGNFSELFKSIEDYEKSLEVKQSVVAQKS

SEQ ID NO: 220 - protein, 440 aa, Artificial Sequence
  AsHPPDm-F372V Amino Acid Sequence
MPPTPATATGAAAAAVTPEHAARSFPRVVRVNPRSDRFPVLSFHHVELWCADAASAAGRFSFALGAPLAARSDLSTGNSAHASLLLRSGALAFLFTAPYAPPPQEAATAAATASIPSFSADAARTFAAAHGLAVRSVGVRVADAAEAFRVSVAGGARPAFAPADLGHGFGLAEVELYGDVVLRFVSYPDETDLPFLPGFERVSSPGAVDYGLTRFDHVVGNVPEMAPVIDYMKGFLGFHEFAEFTAEDVGTTESGLNSVVLANNSEAVLLPLNEPVHGTKRRSQIQTYLEYHGGPGVQHIALASNDVLRTLREMRARTPMGGFEFMAPPQAKYYEGVRRIAGDVLSEEQIKECQELGVLVDRDDQGVLLQIVTKPVGDRPTFFLEMIQRIGCMEKDEVGQEYQKGGCGGFGKGNFSELFKSIEDYEKSLEVKQSVVAQKS

SEQ ID NO: 221 - protein, 440 aa, Artificial Sequence
  AsHPPDm-F372L Amino Acid Sequence
MPPTPATATGAAAAAVTPEHAARSFPRVVRVNPRSDRFPVLSFHHVELWCADAASAAGRFSFALGAPLAARSDLSTGNSAHASLLLRSGALAFLFTAPYAPPPQEAATAAATASIPSFSADAARTFAAAHGLAVRSVGVRVADAAEAFRVSVAGGARPAFAPADLGHGFGLAEVELYGDVVLRFVSYPDETDLPFLPGFERVSSPGAVDYGLTRFDHVVGNVPEMAPVIDYMKGFLGFHEFAEFTAEDVGTTESGLNSVVLANNSEAVLLPLNEPVHGTKRRSQIQTYLEYHGGPGVQHIALASNDVLRTLREMRARTPMGGFEFMAPPQAKYYEGVRRIAGDVLSEEQIKECQELGVLVDRDDQGVLLQILTKPVGDRPTFFLEMIQRIGCMEKDEVGQEYQKGGCGGFGKGNFSELFKSIEDYEKSLEVKQSVVAQKS

SEQ ID NO: 222 - protein, 440 aa, Artificial Sequence
  AsHPPDm-F372I Amino Acid Sequence
MPPTPATATGAAAAAVTPEHAARSFPRVVRVNPRSDRFPVLSFHHVELWCADAASAAGRFSFALGAPLAARSDLSTGNSAHASLLLRSGALAFLFTAPYAPPPQEAATAAATASIPSFSADAARTFAAAHGLAVRSVGVRVADAAEAFRVSVAGGARPAFAPADLGHGFGLAEVELYGDVVLRFVSYPDETDLPFLPGFERVSSPGAVDYGLTRFDHVVGNVPEMAPVIDYMKGFLGFHEFAEFTAEDVGTTESGLNSVVLANNSEAVLLPLNEPVHGTKRRSQIQTYLEYHGGPGVQHIALASNDVLRTLREMRARTPMGGFEFMAPPQAKYYEGVRRIAGDVLSEEQIKECQELGVLVDRDDQGVLLQIITKPVGDRPTFFLEMIQRIGCMEKDEVGQEYQKGGCGGFGKGNFSELFKSIEDYEKSLEVKQSVVAQKS

SEQ ID NO: 223 - protein, 440 aa, Artificial Sequence
  AsHPPDm-F372P Amino Acid Sequence
MPPTPATATGAAAAAVTPEHAARSFPRVVRVNPRSDRFPVLSFHHVELWCADAASAAGRFSFALGAPLAARSDLSTGNSAHASLLLRSGALAFLFTAPYAPPPQEAATAAATASIPSFSADAARTFAAAHGLAVRSVGVRVADAAEAFRVSVAGGARPAFAPADLGHGFGLAEVELYGDVVLRFVSYPDETDLPFLPGFERVSSPGAVDYGLTRFDHVVGNVPEMAPVIDYMKGFLGFHEFAEFTAEDVGTTESGLNSVVLANNSEAVLLPLNEPVHGTKRRSQIQTYLEYHGGPGVQHIALASNDVLRTLREMRARTPMGGFEFMAPPQAKYYEGVRRIAGDVLSEEQIKECQELGVLVDRDDQGVLLQIPTKPVGDRPTFFLEMIQRIGCMEKDEVGQEYQKGGCGGFGKGNFSELFKSIEDYEKSLEVKQSVVAQKS

SEQ ID NO: 224 - protein, 440 aa, Artificial Sequence
  AsHPPDm-F372Y Amino Acid Sequence
MPPTPATATGAAAAAVTPEHAARSFPRVVRVNPRSDRFPVLSFHHVELWCADAASAAGRFSFALGAPLAARSDLSTGNSAHASLLLRSGALAFLFTAPYAPPPQEAATAAATASIPSFSADAARTFAAAHGLAVRSVGVRVADAAEAFRVSVAGGARPAFAPADLGHGFGLAEVELYGDVVLRFVSYPDETDLPFLPGFERVSSPGAVDYGLTRFDHVVGNVPEMAPVIDYMKGFLGFHEFAEFTAEDVGTTESGLNSVVLANNSEAVLLPLNEPVHGTKRRSQIQTYLEYHGGPGVQHIALASNDVLRTLREMRARTPMGGFEFMAPPQAKYYEGVRRIAGDVLSEEQIKECQELGVLVDRDDQGVLLQIYTKPVGDRPTFFLEMIQRIGCMEKDEVGQEYQKGGCGGFGKGNFSELFKSIEDYEKSLEVKQSVVAQKS

SEQ ID NO: 225 - protein, 440 aa, Artificial Sequence
  AsHPPDm-F372W Amino Acid Sequence
MPPTPATATGAAAAAVTPEHAARSFPRVVRVNPRSDRFPVLSFHHVELWCADAASAAGRFSFALGAPLAARSDLSTGNSAHASLLLRSGALAFLFTAPYAPPPQEAATAAATASIPSFSADAARTFAAAHGLAVRSVGVRVADAAEAFRVSVAGGARPAFAPADLGHGFGLAEVELYGDVVLRFVSYPDETDLPFLPGFERVSSPGAVDYGLTRFDHVVGNVPEMAPVIDYMKGFLGFHEFAEFTAEDVGTTESGLNSVVLANNSEAVLLPLNEPVHGTKRRSQIQTYLEYHGGPGVQHIALASNDVLRTLREMRARTPMGGFEFMAPPQAKYYEGVRRIAGDVLSEEQIKECQELGVLVDRDDQGVLLQIWTKPVGDRPTFFLEMIQRIGCMEKDEVGQEYQKGGCGGFGKGNFSELFKSIEDYEKSLEVKQSVVAQKS

SEQ ID NO: 226 - protein, 440 aa, Artificial Sequence
  AsHPPDm-F372S Amino Acid Sequence
MPPTPATATGAAAAAVTPEHAARSFPRVVRVNPRSDRFPVLSFHHVELWCADAASAAGRFSFALGAPLAARSDLSTGNSAHASLLLRSGALAFLFTAPYAPPPQEAATAAATASIPSFSADAARTFAAAHGLAVRSVGVRVADAAEAFRVSVAGGARPAFAPADLGHGFGLAEVELYGDVVLRFVSYPDETDLPFLPGFERVSSPGAVDYGLTRFDHVVGNVPEMAPVIDYMKGFLGFHEFAEFTAEDVGTTESGLNSVVLANNSEAVLLPLNEPVHGTKRRSQIQTYLEYHGGPGVQHIALASNDVLRTLREMRARTPMGGFEFMAPPQAKYYEGVRRIAGDVLSEEQIKECQELGVLVDRDDQGVLLQISTKPVGDRPTFFLEMIQRIGCMEKDEVGQEYQKGGCGGFGKGNFSELFKSIEDYEKSLEVKQSVVAQKS

SEQ ID NO: 227 - protein, 440 aa, Artificial Sequence
  AsHPPDm-F372T Amino Acid Sequence
MPPTPATATGAAAAAVTPEHAARSFPRVVRVNPRSDRFPVLSFHHVELWCADAASAAGRFSFALGAPLAARSDLSTGNSAHASLLLRSGALAFLFTAPYAPPPQEAATAAATASIPSFSADAARTFAAAHGLAVRSVGVRVADAAEAFRVSVAGGARPAFAPADLGHGFGLAEVELYGDVVLRFVSYPDETDLPFLPGFERVSSPGAVDYGLTRFDHVVGNVPEMAPVIDYMKGFLGFHEFAEFTAEDVGTTESGLNSVVLANNSEAVLLPLNEPVHGTKRRSQIQTYLEYHGGPGVQHIALASNDVLRTLREMRARTPMGGFEFMAPPQAKYYEGVRRIAGDVLSEEQIKECQELGVLVDRDDQGVLLQITTKPVGDRPTFFLEMIQRIGCMEKDEVGQEYQKGGCGGFGKGNFSELFKSIEDYEKSLEVKQSVVAQKS

SEQ ID NO: 228 - protein, 440 aa, Artificial Sequence
  AsHPPDm-F372C Amino Acid Sequence
MPPTPATATGAAAAAVTPEHAARSFPRVVRVNPRSDRFPVLSFHHVELWCADAASAAGRFSFALGAPLAARSDLSTGNSAHASLLLRSGALAFLFTAPYAPPPQEAATAAATASIPSFSADAARTFAAAHGLAVRSVGVRVADAAEAFRVSVAGGARPAFAPADLGHGFGLAEVELYGDVVLRFVSYPDETDLPFLPGFERVSSPGAVDYGLTRFDHVVGNVPEMAPVIDYMKGFLGFHEFAEFTAEDVGTTESGLNSVVLANNSEAVLLPLNEPVHGTKRRSQIQTYLEYHGGPGVQHIALASNDVLRTLREMRARTPMGGFEFMAPPQAKYYEGVRRIAGDVLSEEQIKECQELGVLVDRDDQGVLLQICTKPVGDRPTFFLEMIQRIGCMEKDEVGQEYQKGGCGGFGKGNFSELFKSIEDYEKSLEVKQSVVAQKS

SEQ ID NO: 229 - protein, 440 aa, Artificial Sequence
  AsHPPDm-F372M Amino Acid Sequence
MPPTPATATGAAAAAVTPEHAARSFPRVVRVNPRSDRFPVLSFHHVELWCADAASAAGRFSFALGAPLAARSDLSTGNSAHASLLLRSGALAFLFTAPYAPPPQEAATAAATASIPSFSADAARTFAAAHGLAVRSVGVRVADAAEAFRVSVAGGARPAFAPADLGHGFGLAEVELYGDVVLRFVSYPDETDLPFLPGFERVSSPGAVDYGLTRFDHVVGNVPEMAPVIDYMKGFLGFHEFAEFTAEDVGTTESGLNSVVLANNSEAVLLPLNEPVHGTKRRSQIQTYLEYHGGPGVQHIALASNDVLRTLREMRARTPMGGFEFMAPPQAKYYEGVRRIAGDVLSEEQIKECQELGVLVDRDDQGVLLQIMTKPVGDRPTFFLEMIQRIGCMEKDEVGQEYQKGGCGGFGKGNFSELFKSIEDYEKSLEVKQSVVAQKS

SEQ ID NO: 230 - protein, 440 aa, Artificial Sequence
  AsHPPDm-F372N Amino Acid Sequence
MPPTPATATGAAAAAVTPEHAARSFPRVVRVNPRSDRFPVLSFHHVELWCADAASAAGRFSFALGAPLAARSDLSTGNSAHASLLLRSGALAFLFTAPYAPPPQEAATAAATASIPSFSADAARTFAAAHGLAVRSVGVRVADAAEAFRVSVAGGARPAFAPADLGHGFGLAEVELYGDVVLRFVSYPDETDLPFLPGFERVSSPGAVDYGLTRFDHVVGNVPEMAPVIDYMKGFLGFHEFAEFTAEDVGTTESGLNSVVLANNSEAVLLPLNEPVHGTKRRSQIQTYLEYHGGPGVQHIALASNDVLRTLREMRARTPMGGFEFMAPPQAKYYEGVRRIAGDVLSEEQIKECQELGVLVDRDDQGVLLQINTKPVGDRPTFFLEMIQRIGCMEKDEVGQEYQKGGCGGFGKGNFSELFKSIEDYEKSLEVKQSVVAQKS

SEQ ID NO: 231 - protein, 440 aa, Artificial Sequence
  AsHPPDm-F372Q Amino Acid Sequence
MPPTPATATGAAAAAVTPEHAARSFPRVVRVNPRSDRFPVLSFHHVELWCADAASAAGRFSFALGAPLAARSDLSTGNSAHASLLLRSGALAFLFTAPYAPPPQEAATAAATASIPSFSADAARTFAAAHGLAVRSVGVRVADAAEAFRVSVAGGARPAFAPADLGHGFGLAEVELYGDVVLRFVSYPDETDLPFLPGFERVSSPGAVDYGLTRFDHVVGNVPEMAPVIDYMKGFLGFHEFAEFTAEDVGTTESGLNSVVLANNSEAVLLPLNEPVHGTKRRSQIQTYLEYHGGPGVQHIALASNDVLRTLREMRARTPMGGFEFMAPPQAKYYEGVRRIAGDVLSEEQIKECQELGVLVDRDDQGVLLQIQTKPVGDRPTFFLEMIQRIGCMEKDEVGQEYQKGGCGGFGKGNFSELFKSIEDYEKSLEVKQSVVAQKS

SEQ ID NO: 232 - protein, 440 aa, Artificial Sequence
  AsHPPDm-F372D Amino Acid Sequence
MPPTPATATGAAAAAVTPEHAARSFPRVVRVNPRSDRFPVLSFHHVELWCADAASAAGRFSFALGAPLAARSDLSTGNSAHASLLLRSGALAFLFTAPYAPPPQEAATAAATASIPSFSADAARTFAAAHGLAVRSVGVRVADAAEAFRVSVAGGARPAFAPADLGHGFGLAEVELYGDVVLRFVSYPDETDLPFLPGFERVSSPGAVDYGLTRFDHVVGNVPEMAPVIDYMKGFLGFHEFAEFTAEDVGTTESGLNSVVLANNSEAVLLPLNEPVHGTKRRSQIQTYLEYHGGPGVQHIALASNDVLRTLREMRARTPMGGFEFMAPPQAKYYEGVRRIAGDVLSEEQIKECQELGVLVDRDDQGVLLQIDTKPVGDRPTFFLEMIQRIGCMEKDEVGQEYQKGGCGGFGKGNFSELFKSIEDYEKSLEVKQSVVAQKS

SEQ ID NO: 233 - protein, 440 aa, Artificial Sequence
  AsHPPDm-F372E Amino Acid Sequence
MPPTPATATGAAAAAVTPEHAARSFPRVVRVNPRSDRFPVLSFHHVELWCADAASAAGRFSFALGAPLAARSDLSTGNSAHASLLLRSGALAFLFTAPYAPPPQEAATAAATASIPSFSADAARTFAAAHGLAVRSVGVRVADAAEAFRVSVAGGARPAFAPADLGHGFGLAEVELYGDVVLRFVSYPDETDLPFLPGFERVSSPGAVDYGLTRFDHVVGNVPEMAPVIDYMKGFLGFHEFAEFTAEDVGTTESGLNSVVLANNSEAVLLPLNEPVHGTKRRSQIQTYLEYHGGPGVQHIALASNDVLRTLREMRARTPMGGFEFMAPPQAKYYEGVRRIAGDVLSEEQIKECQELGVLVDRDDQGVLLQIETKPVGDRPTFFLEMIQRIGCMEKDEVGQEYQKGGCGGFGKGNFSELFKSIEDYEKSLEVKQSVVAQKS

SEQ ID NO: 234 - protein, 440 aa, Artificial Sequence
  AsHPPDm-F372K Amino Acid Sequence
MPPTPATATGAAAAAVTPEHAARSFPRVVRVNPRSDRFPVLSFHHVELWCADAASAAGRFSFALGAPLAARSDLSTGNSAHASLLLRSGALAFLFTAPYAPPPQEAATAAATASIPSFSADAARTFAAAHGLAVRSVGVRVADAAEAFRVSVAGGARPAFAPADLGHGFGLAEVELYGDVVLRFVSYPDETDLPFLPGFERVSSPGAVDYGLTRFDHVVGNVPEMAPVIDYMKGFLGFHEFAEFTAEDVGTTESGLNSVVLANNSEAVLLPLNEPVHGTKRRSQIQTYLEYHGGPGVQHIALASNDVLRTLREMRARTPMGGFEFMAPPQAKYYEGVRRIAGDVLSEEQIKECQELGVLVDRDDQGVLLQIKTKPVGDRPTFFLEMIQRIGCMEKDEVGQEYQKGGCGGFGKGNFSELFKSIEDYEKSLEVKQSVVAQKS

SEQ ID NO: 235 - protein, 440 aa, Artificial Sequence
  AsHPPDm-F372R Amino Acid Sequence
MPPTPATATGAAAAAVTPEHAARSFPRVVRVNPRSDRFPVLSFHHVELWCADAASAAGRFSFALGAPLAARSDLSTGNSAHASLLLRSGALAFLFTAPYAPPPQEAATAAATASIPSFSADAARTFAAAHGLAVRSVGVRVADAAEAFRVSVAGGARPAFAPADLGHGFGLAEVELYGDVVLRFVSYPDETDLPFLPGFERVSSPGAVDYGLTRFDHVVGNVPEMAPVIDYMKGFLGFHEFAEFTAEDVGTTESGLNSVVLANNSEAVLLPLNEPVHGTKRRSQIQTYLEYHGGPGVQHIALASNDVLRTLREMRARTPMGGFEFMAPPQAKYYEGVRRIAGDVLSEEQIKECQELGVLVDRDDQGVLLQIRTKPVGDRPTFFLEMIQRIGCMEKDEVGQEYQKGGCGGFGKGNFSELFKSIEDYEKSLEVKQSVVAQKS

SEQ ID NO: 236 - protein, 440 aa, Artificial Sequence
  AsHPPDm-F372H Amino Acid Sequence
MPPTPATATGAAAAAVTPEHAARSFPRVVRVNPRSDRFPVLSFHHVELWCADAASAAGRFSFALGAPLAARSDLSTGNSAHASLLLRSGALAFLFTAPYAPPPQEAATAAATASIPSFSADAARTFAAAHGLAVRSVGVRVADAAEAFRVSVAGGARPAFAPADLGHGFGLAEVELYGDVVLRFVSYPDETDLPFLPGFERVSSPGAVDYGLTRFDHVVGNVPEMAPVIDYMKGFLGFHEFAEFTAEDVGTTESGLNSVVLANNSEAVLLPLNEPVHGTKRRSQIQTYLEYHGGPGVQHIALASNDVLRTLREMRARTPMGGFEFMAPPQAKYYEGVRRIAGDVLSEEQIKECQELGVLVDRDDQGVLLQIHTKPVGDRPTFFLEMIQRIGCMEKDEVGQEYQKGGCGGFGKGNFSELFKSIEDYEKSLEVKQSVVAQKS

SEQ ID NO: 237 - protein, 439 aa, Artificial Sequence
  AsHPPDm-F372 Amino Acid Sequence
MPPTPATATGAAAAAVTPEHAARSFPRVVRVNPRSDRFPVLSFHHVELWCADAASAAGRFSFALGAPLAARSDLSTGNSAHASLLLRSGALAFLFTAPYAPPPQEAATAAATASIPSFSADAARTFAAAHGLAVRSVGVRVADAAEAFRVSVAGGARPAFAPADLGHGFGLAEVELYGDVVLRFVSYPDETDLPFLPGFERVSSPGAVDYGLTRFDHVVGNVPEMAPVIDYMKGFLGFHEFAEFTAEDVGTTESGLNSVVLANNSEAVLLPLNEPVHGTKRRSQIQTYLEYHGGPGVQHIALASNDVLRTLREMRARTPMGGFEFMAPPQAKYYEGVRRIAGDVLSEEQIKECQELGVLVDRDDQGVLLQITKPVGDRPTFFLEMIQRIGCMEKDEVGQEYQKGGCGGFGKGNFSELFKSIEDYEKSLEVKQSVVAQKS

SEQ ID NO: 238 - DNA, 1323 bp, Artificial Sequence
  AsHPPDm-F372G Nucleotide Sequence
atgccacctactccagctacagctactggtgctgctgctgctgccgttactcctgagcacgctgccaggtcattccccagggtggttcgcgtgaaccccagatctgataggttcccagttctgagcttccaccatgttgagctgtggtgcgctgatgctgcttctgctgctggcaggttctctttcgctcttggtgctccactcgctgctagatctgatctgtctacaggaaatagcgctcatgcctcactcctgcttcgctcaggtgctttggccttcctcttcaccgctccatatgctcccccacctcaggaggctgctactgctgctgctacagcctccattccaagcttctcagctgatgccgctagaaccttcgctgctgctcatggacttgccgtgaggtctgttggtgttcgcgtggctgatgctgctgaggctttcagagtttccgttgccggcggagctaggccagctttcgctcctgctgatttgggacatggtttcggcctggctgaggttgagctttacggtgacgtggttctccgcttcgtgtcttacccagatgagactgacctgcctttccttcccggcttcgagagagtttcctctcctggtgccgtggattacggcctgacaaggttcgaccacgtggttggaaacgttcccgagatggctccagtgatcgattacatgaagggcttccttggattccatgagttcgccgagttcactgctgaggacgtgggaaccactgagtccggtttgaactctgtggttctcgccaacaattctgaggctgttttgctccctctgaatgagcctgtgcatggaaccaagaggagaagccagattcaaacttacctggagtaccacggtggccctggagttcagcatatcgcccttgcttctaatgatgtgttgcgcacactcagagagatgcgcgccagaacccccatgggaggtttcgagttcatggccccaccacaggctaagtactacgagggcgttagaaggattgctggagacgtgttgagcgaggagcagatcaaggagtgccaagagctgggtgttcttgtggatagggatgaccagggcgttctgcttcaaattggcactaagccagtgggcgaccgccctacattcttccttgagatgattcaaagaatcggctgcatggagaaggatgaggttggacaggagtaccaaaagggcggatgcggtggcttcggaaagggtaacttcagcgagttgttcaagtcaatcgaggactacgagaagagcctcgaggtgaagcagtcagtggttgcccaaaagtcctga

SEQ ID NO: 239 - DNA, 1323 bp, Artificial Sequence
  AsHPPDm-F372V Nucleotide Sequence
atgccacctactccagctacagctactggtgctgctgctgctgccgttactcctgagcacgctgccaggtcattccccagggtggttcgcgtgaaccccagatctgataggttcccagttctgagcttccaccatgttgagctgtggtgcgctgatgctgcttctgctgctggcaggttctctttcgctcttggtgctccactcgctgctagatctgatctgtctacaggaaatagcgctcatgcctcactcctgcttcgctcaggtgctttggccttcctcttcaccgctccatatgctcccccacctcaggaggctgctactgctgctgctacagcctccattccaagcttctcagctgatgccgctagaaccttcgctgctgctcatggacttgccgtgaggtctgttggtgttcgcgtggctgatgctgctgaggctttcagagtttccgttgccggcggagctaggccagctttcgctcctgctgatttgggacatggtttcggcctggctgaggttgagctttacggtgacgtggttctccgcttcgtgtcttacccagatgagactgacctgcctttccttcccggcttcgagagagtttcctctcctggtgccgtggattacggcctgacaaggttcgaccacgtggttggaaacgttcccgagatggctccagtgatcgattacatgaagggcttccttggattccatgagttcgccgagttcactgctgaggacgtgggaaccactgagtccggtttgaactctgtggttctcgccaacaattctgaggctgttttgctccctctgaatgagcctgtgcatggaaccaagaggagaagccagattcaaacttacctggagtaccacggtggccctggagttcagcatatcgcccttgcttctaatgatgtgttgcgcacactcagagagatgcgcgccagaacccccatgggaggtttcgagttcatggccccaccacaggctaagtactacgagggcgttagaaggattgctggagacgtgttgagcgaggagcagatcaaggagtgccaagagctgggtgttcttgtggatagggatgaccagggcgttctgcttcaaattgtcactaagccagtgggcgaccgccctacattcttccttgagatgattcaaagaatcggctgcatggagaaggatgaggttggacaggagtaccaaaagggcggatgcggtggcttcggaaagggtaacttcagcgagttgttcaagtcaatcgaggactacgagaagagcctcgaggtgaagcagtcagtggttgcccaaaagtcctga

SEQ ID NO: 240 - DNA, 1323 bp, Artificial Sequence
  AsHPPDm-F372L Nucleotide Sequence
atgccacctactccagctacagctactggtgctgctgctgctgccgttactcctgagcacgctgccaggtcattccccagggtggttcgcgtgaaccccagatctgataggttcccagttctgagcttccaccatgttgagctgtggtgcgctgatgctgcttctgctgctggcaggttctctttcgctcttggtgctccactcgctgctagatctgatctgtctacaggaaatagcgctcatgcctcactcctgcttcgctcaggtgctttggccttcctcttcaccgctccatatgctcccccacctcaggaggctgctactgctgctgctacagcctccattccaagcttctcagctgatgccgctagaaccttcgctgctgctcatggacttgccgtgaggtctgttggtgttcgcgtggctgatgctgctgaggctttcagagtttccgttgccggcggagctaggccagctttcgctcctgctgatttgggacatggtttcggcctggctgaggttgagctttacggtgacgtggttctccgcttcgtgtcttacccagatgagactgacctgcctttccttcccggcttcgagagagtttcctctcctggtgccgtggattacggcctgacaaggttcgaccacgtggttggaaacgttcccgagatggctccagtgatcgattacatgaagggcttccttggattccatgagttcgccgagttcactgctgaggacgtgggaaccactgagtccggtttgaactctgtggttctcgccaacaattctgaggctgttttgctccctctgaatgagcctgtgcatggaaccaagaggagaagccagattcaaacttacctggagtaccacggtggccctggagttcagcatatcgcccttgcttctaatgatgtgttgcgcacactcagagagatgcgcgccagaacccccatgggaggtttcgagttcatggccccaccacaggctaagtactacgagggcgttagaaggattgctggagacgtgttgagcgaggagcagatcaaggagtgccaagagctgggtgttcttgtggatagggatgaccagggcgttctgcttcaaattctcactaagccagtgggcgaccgccctacattcttccttgagatgattcaaagaatcggctgcatggagaaggatgaggttggacaggagtaccaaaagggcggatgcggtggcttcggaaagggtaacttcagcgagttgttcaagtcaatcgaggactacgagaagagcctcgaggtgaagcagtcagtggttgcccaaaagtcctga

SEQ ID NO: 241 - DNA, 1323 bp, Artificial Sequence
  AsHPPDm-F372I Nucleotide Sequence
atgccacctactccagctacagctactggtgctgctgctgctgccgttactcctgagcacgctgccaggtcattccccagggtggttcgcgtgaaccccagatctgataggttcccagttctgagcttccaccatgttgagctgtggtgcgctgatgctgcttctgctgctggcaggttctctttcgctcttggtgctccactcgctgctagatctgatctgtctacaggaaatagcgctcatgcctcactcctgcttcgctcaggtgctttggccttcctcttcaccgctccatatgctcccccacctcaggaggctgctactgctgctgctacagcctccattccaagcttctcagctgatgccgctagaaccttcgctgctgctcatggacttgccgtgaggtctgttggtgttcgcgtggctgatgctgctgaggctttcagagtttccgttgccggcggagctaggccagctttcgctcctgctgatttgggacatggtttcggcctggctgaggttgagctttacggtgacgtggttctccgcttcgtgtcttacccagatgagactgacctgcctttccttcccggcttcgagagagtttcctctcctggtgccgtggattacggcctgacaaggttcgaccacgtggttggaaacgttcccgagatggctccagtgatcgattacatgaagggcttccttggattccatgagttcgccgagttcactgctgaggacgtgggaaccactgagtccggtttgaactctgtggttctcgccaacaattctgaggctgttttgctccctctgaatgagcctgtgcatggaaccaagaggagaagccagattcaaacttacctggagtaccacggtggccctggagttcagcatatcgcccttgcttctaatgatgtgttgcgcacactcagagagatgcgcgccagaacccccatgggaggtttcgagttcatggccccaccacaggctaagtactacgagggcgttagaaggattgctggagacgtgttgagcgaggagcagatcaaggagtgccaagagctgggtgttcttgtggatagggatgaccagggcgttctgcttcaaattatcactaagccagtgggcgaccgccctacattcttccttgagatgattcaaagaatcggctgcatggagaaggatgaggttggacaggagtaccaaaagggcggatgcggtggcttcggaaagggtaacttcagcgagttgttcaagtcaatcgaggactacgagaagagcctcgaggtgaagcagtcagtggttgcccaaaagtcctga

SEQ ID NO: 242 - DNA, 1323 bp, Artificial Sequence
  AsHPPDm-F372P Nucleotide Sequence
atgccacctactccagctacagctactggtgctgctgctgctgccgttactcctgagcacgctgccaggtcattccccagggtggttcgcgtgaaccccagatctgataggttcccagttctgagcttccaccatgttgagctgtggtgcgctgatgctgcttctgctgctggcaggttctctttcgctcttggtgctccactcgctgctagatctgatctgtctacaggaaatagcgctcatgcctcactcctgcttcgctcaggtgctttggccttcctcttcaccgctccatatgctcccccacctcaggaggctgctactgctgctgctacagcctccattccaagcttctcagctgatgccgctagaaccttcgctgctgctcatggacttgccgtgaggtctgttggtgttcgcgtggctgatgctgctgaggctttcagagtttccgttgccggcggagctaggccagctttcgctcctgctgatttgggacatggtttcggcctggctgaggttgagctttacggtgacgtggttctccgcttcgtgtcttacccagatgagactgacctgcctttccttcccggcttcgagagagtttcctctcctggtgccgtggattacggcctgacaaggttcgaccacgtggttggaaacgttcccgagatggctccagtgatcgattacatgaagggcttccttggattccatgagttcgccgagttcactgctgaggacgtgggaaccactgagtccggtttgaactctgtggttctcgccaacaattctgaggctgttttgctccctctgaatgagcctgtgcatggaaccaagaggagaagccagattcaaacttacctggagtaccacggtggccctggagttcagcatatcgcccttgcttctaatgatgtgttgcgcacactcagagagatgcgcgccagaacccccatgggaggtttcgagttcatggccccaccacaggctaagtactacgagggcgttagaaggattgctggagacgtgttgagcgaggagcagatcaaggagtgccaagagctgggtgttcttgtggatagggatgaccagggcgttctgcttcaaattcctactaagccagtgggcgaccgccctacattcttccttgagatgattcaaagaatcggctgcatggagaaggatgaggttggacaggagtaccaaaagggcggatgcggtggcttcggaaagggtaacttcagcgagttgttcaagtcaatcgaggactacgagaagagcctcgaggtgaagcagtcagtggttgcccaaaagtcctga

SEQ ID NO: 243 - DNA, 1323 bp, Artificial Sequence
  AsHPPDm-F372Y Nucleotide Sequence
atgccacctactccagctacagctactggtgctgctgctgctgccgttactcctgagcacgctgccaggtcattccccagggtggttcgcgtgaaccccagatctgataggttcccagttctgagcttccaccatgttgagctgtggtgcgctgatgctgcttctgctgctggcaggttctctttcgctcttggtgctccactcgctgctagatctgatctgtctacaggaaatagcgctcatgcctcactcctgcttcgctcaggtgctttggccttcctcttcaccgctccatatgctcccccacctcaggaggctgctactgctgctgctacagcctccattccaagcttctcagctgatgccgctagaaccttcgctgctgctcatggacttgccgtgaggtctgttggtgttcgcgtggctgatgctgctgaggctttcagagtttccgttgccggcggagctaggccagctttcgctcctgctgatttgggacatggtttcggcctggctgaggttgagctttacggtgacgtggttctccgcttcgtgtcttacccagatgagactgacctgcctttccttcccggcttcgagagagtttcctctcctggtgccgtggattacggcctgacaaggttcgaccacgtggttggaaacgttcccgagatggctccagtgatcgattacatgaagggcttccttggattccatgagttcgccgagttcactgctgaggacgtgggaaccactgagtccggtttgaactctgtggttctcgccaacaattctgaggctgttttgctccctctgaatgagcctgtgcatggaaccaagaggagaagccagattcaaacttacctggagtaccacggtggccctggagttcagcatatcgcccttgcttctaatgatgtgttgcgcacactcagagagatgcgcgccagaacccccatgggaggtttcgagttcatggccccaccacaggctaagtactacgagggcgttagaaggattgctggagacgtgttgagcgaggagcagatcaaggagtgccaagagctgggtgttcttgtggatagggatgaccagggcgttctgcttcaaatttacactaagccagtgggcgaccgccctacattcttccttgagatgattcaaagaatcggctgcatggagaaggatgaggttggacaggagtaccaaaagggcggatgcggtggcttcggaaagggtaacttcagcgagttgttcaagtcaatcgaggactacgagaagagcctcgaggtgaagcagtcagtggttgcccaaaagtcctga

SEQ ID NO: 244 - DNA, 1323 bp, Artificial Sequence
  AsHPPDm-F372W Nucleotide Sequence
atgccacctactccagctacagctactggtgctgctgctgctgccgttactcctgagcacgctgccaggtcattccccagggtggttcgcgtgaaccccagatctgataggttcccagttctgagcttccaccatgttgagctgtggtgcgctgatgctgcttctgctgctggcaggttctctttcgctcttggtgctccactcgctgctagatctgatctgtctacaggaaatagcgctcatgcctcactcctgcttcgctcaggtgctttggccttcctcttcaccgctccatatgctcccccacctcaggaggctgctactgctgctgctacagcctccattccaagcttctcagctgatgccgctagaaccttcgctgctgctcatggacttgccgtgaggtctgttggtgttcgcgtggctgatgctgctgaggctttcagagtttccgttgccggcggagctaggccagctttcgctcctgctgatttgggacatggtttcggcctggctgaggttgagctttacggtgacgtggttctccgcttcgtgtcttacccagatgagactgacctgcctttccttcccggcttcgagagagtttcctctcctggtgccgtggattacggcctgacaaggttcgaccacgtggttggaaacgttcccgagatggctccagtgatcgattacatgaagggcttccttggattccatgagttcgccgagttcactgctgaggacgtgggaaccactgagtccggtttgaactctgtggttctcgccaacaattctgaggctgttttgctccctctgaatgagcctgtgcatggaaccaagaggagaagccagattcaaacttacctggagtaccacggtggccctggagttcagcatatcgcccttgcttctaatgatgtgttgcgcacactcagagagatgcgcgccagaacccccatgggaggtttcgagttcatggccccaccacaggctaagtactacgagggcgttagaaggattgctggagacgtgttgagcgaggagcagatcaaggagtgccaagagctgggtgttcttgtggatagggatgaccagggcgttctgcttcaaatttggactaagccagtgggcgaccgccctacattcttccttgagatgattcaaagaatcggctgcatggagaaggatgaggttggacaggagtaccaaaagggcggatgcggtggcttcggaaagggtaacttcagcgagttgttcaagtcaatcgaggactacgagaagagcctcgaggtgaagcagtcagtggttgcccaaaagtcctga

SEQ ID NO: 245 - DNA, 1323 bp, Artificial Sequence
  AsHPPDm-F372S Nucleotide Sequence
atgccacctactccagctacagctactggtgctgctgctgctgccgttactcctgagcacgctgccaggtcattccccagggtggttcgcgtgaaccccagatctgataggttcccagttctgagcttccaccatgttgagctgtggtgcgctgatgctgcttctgctgctggcaggttctctttcgctcttggtgctccactcgctgctagatctgatctgtctacaggaaatagcgctcatgcctcactcctgcttcgctcaggtgctttggccttcctcttcaccgctccatatgctcccccacctcaggaggctgctactgctgctgctacagcctccattccaagcttctcagctgatgccgctagaaccttcgctgctgctcatggacttgccgtgaggtctgttggtgttcgcgtggctgatgctgctgaggctttcagagtttccgttgccggcggagctaggccagctttcgctcctgctgatttgggacatggtttcggcctggctgaggttgagctttacggtgacgtggttctccgcttcgtgtcttacccagatgagactgacctgcctttccttcccggcttcgagagagtttcctctcctggtgccgtggattacggcctgacaaggttcgaccacgtggttggaaacgttcccgagatggctccagtgatcgattacatgaagggcttccttggattccatgagttcgccgagttcactgctgaggacgtgggaaccactgagtccggtttgaactctgtggttctcgccaacaattctgaggctgttttgctccctctgaatgagcctgtgcatggaaccaagaggagaagccagattcaaacttacctggagtaccacggtggccctggagttcagcatatcgcccttgcttctaatgatgtgttgcgcacactcagagagatgcgcgccagaacccccatgggaggtttcgagttcatggccccaccacaggctaagtactacgagggcgttagaaggattgctggagacgtgttgagcgaggagcagatcaaggagtgccaagagctgggtgttcttgtggatagggatgaccagggcgttctgcttcaaatttccactaagccagtgggcgaccgccctacattcttccttgagatgattcaaagaatcggctgcatggagaaggatgaggttggacaggagtaccaaaagggcggatgcggtggcttcggaaagggtaacttcagcgagttgttcaagtcaatcgaggactacgagaagagcctcgaggtgaagcagtcagtggttgcccaaaagtcctga

SEQ ID NO: 246 - DNA, 1323 bp, Artificial Sequence
  AsHPPDm-F372T Nucleotide Sequence
atgccacctactccagctacagctactggtgctgctgctgctgccgttactcctgagcacgctgccaggtcattccccagggtggttcgcgtgaaccccagatctgataggttcccagttctgagcttccaccatgttgagctgtggtgcgctgatgctgcttctgctgctggcaggttctctttcgctcttggtgctccactcgctgctagatctgatctgtctacaggaaatagcgctcatgcctcactcctgcttcgctcaggtgctttggccttcctcttcaccgctccatatgctcccccacctcaggaggctgctactgctgctgctacagcctccattccaagcttctcagctgatgccgctagaaccttcgctgctgctcatggacttgccgtgaggtctgttggtgttcgcgtggctgatgctgctgaggctttcagagtttccgttgccggcggagctaggccagctttcgctcctgctgatttgggacatggtttcggcctggctgaggttgagctttacggtgacgtggttctccgcttcgtgtcttacccagatgagactgacctgcctttccttcccggcttcgagagagtttcctctcctggtgccgtggattacggcctgacaaggttcgaccacgtggttggaaacgttcccgagatggctccagtgatcgattacatgaagggcttccttggattccatgagttcgccgagttcactgctgaggacgtgggaaccactgagtccggtttgaactctgtggttctcgccaacaattctgaggctgttttgctccctctgaatgagcctgtgcatggaaccaagaggagaagccagattcaaacttacctggagtaccacggtggccctggagttcagcatatcgcccttgcttctaatgatgtgttgcgcacactcagagagatgcgcgccagaacccccatgggaggtttcgagttcatggccccaccacaggctaagtactacgagggcgttagaaggattgctggagacgtgttgagcgaggagcagatcaaggagtgccaagagctgggtgttcttgtggatagggatgaccagggcgttctgcttcaaattaccactaagccagtgggcgaccgccctacattcttccttgagatgattcaaagaatcggctgcatggagaaggatgaggttggacaggagtaccaaaagggcggatgcggtggcttcggaaagggtaacttcagcgagttgttcaagtcaatcgaggactacgagaagagcctcgaggtgaagcagtcagtggttgcccaaaagtcctga

SEQ ID NO: 247 - DNA, 1323 bp, Artificial Sequence
  AsHPPDm-F372C Nucleotide Sequence
atgccacctactccagctacagctactggtgctgctgctgctgccgttactcctgagcacgctgccaggtcattccccagggtggttcgcgtgaaccccagatctgataggttcccagttctgagcttccaccatgttgagctgtggtgcgctgatgctgcttctgctgctggcaggttctctttcgctcttggtgctccactcgctgctagatctgatctgtctacaggaaatagcgctcatgcctcactcctgcttcgctcaggtgctttggccttcctcttcaccgctccatatgctcccccacctcaggaggctgctactgctgctgctacagcctccattccaagcttctcagctgatgccgctagaaccttcgctgctgctcatggacttgccgtgaggtctgttggtgttcgcgtggctgatgctgctgaggctttcagagtttccgttgccggcggagctaggccagctttcgctcctgctgatttgggacatggtttcggcctggctgaggttgagctttacggtgacgtggttctccgcttcgtgtcttacccagatgagactgacctgcctttccttcccggcttcgagagagtttcctctcctggtgccgtggattacggcctgacaaggttcgaccacgtggttggaaacgttcccgagatggctccagtgatcgattacatgaagggcttccttggattccatgagttcgccgagttcactgctgaggacgtgggaaccactgagtccggtttgaactctgtggttctcgccaacaattctgaggctgttttgctccctctgaatgagcctgtgcatggaaccaagaggagaagccagattcaaacttacctggagtaccacggtggccctggagttcagcatatcgcccttgcttctaatgatgtgttgcgcacactcagagagatgcgcgccagaacccccatgggaggtttcgagttcatggccccaccacaggctaagtactacgagggcgttagaaggattgctggagacgtgttgagcgaggagcagatcaaggagtgccaagagctgggtgttcttgtggatagggatgaccagggcgttctgcttcaaatttgcactaagccagtgggcgaccgccctacattcttccttgagatgattcaaagaatcggctgcatggagaaggatgaggttggacaggagtaccaaaagggcggatgcggtggcttcggaaagggtaacttcagcgagttgttcaagtcaatcgaggactacgagaagagcctcgaggtgaagcagtcagtggttgcccaaaagtcctga

SEQ ID NO: 248 - DNA, 1323 bp, Artificial Sequence
  AsHPPDm-F372M Nucleotide Sequence
atgccacctactccagctacagctactggtgctgctgctgctgccgttactcctgagcacgctgccaggtcattccccagggtggttcgcgtgaaccccagatctgataggttcccagttctgagcttccaccatgttgagctgtggtgcgctgatgctgcttctgctgctggcaggttctctttcgctcttggtgctccactcgctgctagatctgatctgtctacaggaaatagcgctcatgcctcactcctgcttcgctcaggtgctttggccttcctcttcaccgctccatatgctcccccacctcaggaggctgctactgctgctgctacagcctccattccaagcttctcagctgatgccgctagaaccttcgctgctgctcatggacttgccgtgaggtctgttggtgttcgcgtggctgatgctgctgaggctttcagagtttccgttgccggcggagctaggccagctttcgctcctgctgatttgggacatggtttcggcctggctgaggttgagctttacggtgacgtggttctccgcttcgtgtcttacccagatgagactgacctgcctttccttcccggcttcgagagagtttcctctcctggtgccgtggattacggcctgacaaggttcgaccacgtggttggaaacgttcccgagatggctccagtgatcgattacatgaagggcttccttggattccatgagttcgccgagttcactgctgaggacgtgggaaccactgagtccggtttgaactctgtggttctcgccaacaattctgaggctgttttgctccctctgaatgagcctgtgcatggaaccaagaggagaagccagattcaaacttacctggagtaccacggtggccctggagttcagcatatcgcccttgcttctaatgatgtgttgcgcacactcagagagatgcgcgccagaacccccatgggaggtttcgagttcatggccccaccacaggctaagtactacgagggcgttagaaggattgctggagacgtgttgagcgaggagcagatcaaggagtgccaagagctgggtgttcttgtggatagggatgaccagggcgttctgcttcaaattatgactaagccagtgggcgaccgccctacattcttccttgagatgattcaaagaatcggctgcatggagaaggatgaggttggacaggagtaccaaaagggcggatgcggtggcttcggaaagggtaacttcagcgagttgttcaagtcaatcgaggactacgagaagagcctcgaggtgaagcagtcagtggttgcccaaaagtcctga

SEQ ID NO: 249 - DNA, 1323 bp, Artificial Sequence
  AsHPPDm-F372N Nucleotide Sequence
atgccacctactccagctacagctactggtgctgctgctgctgccgttactcctgagcacgctgccaggtcattccccagggtggttcgcgtgaaccccagatctgataggttcccagttctgagcttccaccatgttgagctgtggtgcgctgatgctgcttctgctgctggcaggttctctttcgctcttggtgctccactcgctgctagatctgatctgtctacaggaaatagcgctcatgcctcactcctgcttcgctcaggtgctttggccttcctcttcaccgctccatatgctcccccacctcaggaggctgctactgctgctgctacagcctccattccaagcttctcagctgatgccgctagaaccttcgctgctgctcatggacttgccgtgaggtctgttggtgttcgcgtggctgatgctgctgaggctttcagagtttccgttgccggcggagctaggccagctttcgctcctgctgatttgggacatggtttcggcctggctgaggttgagctttacggtgacgtggttctccgcttcgtgtcttacccagatgagactgacctgcctttccttcccggcttcgagagagtttcctctcctggtgccgtggattacggcctgacaaggttcgaccacgtggttggaaacgttcccgagatggctccagtgatcgattacatgaagggcttccttggattccatgagttcgccgagttcactgctgaggacgtgggaaccactgagtccggtttgaactctgtggttctcgccaacaattctgaggctgttttgctccctctgaatgagcctgtgcatggaaccaagaggagaagccagattcaaacttacctggagtaccacggtggccctggagttcagcatatcgcccttgcttctaatgatgtgttgcgcacactcagagagatgcgcgccagaacccccatgggaggtttcgagttcatggccccaccacaggctaagtactacgagggcgttagaaggattgctggagacgtgttgagcgaggagcagatcaaggagtgccaagagctgggtgttcttgtggatagggatgaccagggcgttctgcttcaaattaacactaagccagtgggcgaccgccctacattcttccttgagatgattcaaagaatcggctgcatggagaaggatgaggttggacaggagtaccaaaagggcggatgcggtggcttcggaaagggtaacttcagcgagttgttcaagtcaatcgaggactacgagaagagcctcgaggtgaagcagtcagtggttgcccaaaagtcctga

SEQ ID NO: 250 - DNA, 1323 bp, Artificial Sequence
  AsHPPDm-F372Q Nucleotide Sequence
atgccacctactccagctacagctactggtgctgctgctgctgccgttactcctgagcacgctgccaggtcattccccagggtggttcgcgtgaaccccagatctgataggttcccagttctgagcttccaccatgttgagctgtggtgcgctgatgctgcttctgctgctggcaggttctctttcgctcttggtgctccactcgctgctagatctgatctgtctacaggaaatagcgctcatgcctcactcctgcttcgctcaggtgctttggccttcctcttcaccgctccatatgctcccccacctcaggaggctgctactgctgctgctacagcctccattccaagcttctcagctgatgccgctagaaccttcgctgctgctcatggacttgccgtgaggtctgttggtgttcgcgtggctgatgctgctgaggctttcagagtttccgttgccggcggagctaggccagctttcgctcctgctgatttgggacatggtttcggcctggctgaggttgagctttacggtgacgtggttctccgcttcgtgtcttacccagatgagactgacctgcctttccttcccggcttcgagagagtttcctctcctggtgccgtggattacggcctgacaaggttcgaccacgtggttggaaacgttcccgagatggctccagtgatcgattacatgaagggcttccttggattccatgagttcgccgagttcactgctgaggacgtgggaaccactgagtccggtttgaactctgtggttctcgccaacaattctgaggctgttttgctccctctgaatgagcctgtgcatggaaccaagaggagaagccagattcaaacttacctggagtaccacggtggccctggagttcagcatatcgcccttgcttctaatgatgtgttgcgcacactcagagagatgcgcgccagaacccccatgggaggtttcgagttcatggccccaccacaggctaagtactacgagggcgttagaaggattgctggagacgtgttgagcgaggagcagatcaaggagtgccaagagctgggtgttcttgtggatagggatgaccagggcgttctgcttcaaattcaaactaagccagtgggcgaccgccctacattcttccttgagatgattcaaagaatcggctgcatggagaaggatgaggttggacaggagtaccaaaagggcggatgcggtggcttcggaaagggtaacttcagcgagttgttcaagtcaatcgaggactacgagaagagcctcgaggtgaagcagtcagtggttgcccaaaagtcctga

SEQ ID NO: 251 - DNA, 1323 bp, Artificial Sequence
  AsHPPDm-F372D Nucleotide Sequence
atgccacctactccagctacagctactggtgctgctgctgctgccgttactcctgagcacgctgccaggtcattccccagggtggttcgcgtgaaccccagatctgataggttcccagttctgagcttccaccatgttgagctgtggtgcgctgatgctgcttctgctgctggcaggttctctttcgctcttggtgctccactcgctgctagatctgatctgtctacaggaaatagcgctcatgcctcactcctgcttcgctcaggtgctttggccttcctcttcaccgctccatatgctcccccacctcaggaggctgctactgctgctgctacagcctccattccaagcttctcagctgatgccgctagaaccttcgctgctgctcatggacttgccgtgaggtctgttggtgttcgcgtggctgatgctgctgaggctttcagagtttccgttgccggcggagctaggccagctttcgctcctgctgatttgggacatggtttcggcctggctgaggttgagctttacggtgacgtggttctccgcttcgtgtcttacccagatgagactgacctgcctttccttcccggcttcgagagagtttcctctcctggtgccgtggattacggcctgacaaggttcgaccacgtggttggaaacgttcccgagatggctccagtgatcgattacatgaagggcttccttggattccatgagttcgccgagttcactgctgaggacgtgggaaccactgagtccggtttgaactctgtggttctcgccaacaattctgaggctgttttgctccctctgaatgagcctgtgcatggaaccaagaggagaagccagattcaaacttacctggagtaccacggtggccctggagttcagcatatcgcccttgcttctaatgatgtgttgcgcacactcagagagatgcgcgccagaacccccatgggaggtttcgagttcatggccccaccacaggctaagtactacgagggcgttagaaggattgctggagacgtgttgagcgaggagcagatcaaggagtgccaagagctgggtgttcttgtggatagggatgaccagggcgttctgcttcaaattgacactaagccagtgggcgaccgccctacattcttccttgagatgattcaaagaatcggctgcatggagaaggatgaggttggacaggagtaccaaaagggcggatgcggtggcttcggaaagggtaacttcagcgagttgttcaagtcaatcgaggactacgagaagagcctcgaggtgaagcagtcagtggttgcccaaaagtcctga

SEQ ID NO: 252 - DNA, 1323 bp, Artificial Sequence
  AsHPPDm-F372E Nucleotide Sequence
atgccacctactccagctacagctactggtgctgctgctgctgccgttactcctgagcacgctgccaggtcattccccagggtggttcgcgtgaaccccagatctgataggttcccagttctgagcttccaccatgttgagctgtggtgcgctgatgctgcttctgctgctggcaggttctctttcgctcttggtgctccactcgctgctagatctgatctgtctacaggaaatagcgctcatgcctcactcctgcttcgctcaggtgctttggccttcctcttcaccgctccatatgctcccccacctcaggaggctgctactgctgctgctacagcctccattccaagcttctcagctgatgccgctagaaccttcgctgctgctcatggacttgccgtgaggtctgttggtgttcgcgtggctgatgctgctgaggctttcagagtttccgttgccggcggagctaggccagctttcgctcctgctgatttgggacatggtttcggcctggctgaggttgagctttacggtgacgtggttctccgcttcgtgtcttacccagatgagactgacctgcctttccttcccggcttcgagagagtttcctctcctggtgccgtggattacggcctgacaaggttcgaccacgtggttggaaacgttcccgagatggctccagtgatcgattacatgaagggcttccttggattccatgagttcgccgagttcactgctgaggacgtgggaaccactgagtccggtttgaactctgtggttctcgccaacaattctgaggctgttttgctccctctgaatgagcctgtgcatggaaccaagaggagaagccagattcaaacttacctggagtaccacggtggccctggagttcagcatatcgcccttgcttctaatgatgtgttgcgcacactcagagagatgcgcgccagaacccccatgggaggtttcgagttcatggccccaccacaggctaagtactacgagggcgttagaaggattgctggagacgtgttgagcgaggagcagatcaaggagtgccaagagctgggtgttcttgtggatagggatgaccagggcgttctgcttcaaattgagactaagccagtgggcgaccgccctacattcttccttgagatgattcaaagaatcggctgcatggagaaggatgaggttggacaggagtaccaaaagggcggatgcggtggcttcggaaagggtaacttcagcgagttgttcaagtcaatcgaggactacgagaagagcctcgaggtgaagcagtcagtggttgcccaaaagtcctga

SEQ ID NO: 253 - DNA, 1323 bp, Artificial Sequence
  AsHPPDm-F372K Nucleotide Sequence
atgccacctactccagctacagctactggtgctgctgctgctgccgttactcctgagcacgctgccaggtcattccccagggtggttcgcgtgaaccccagatctgataggttcccagttctgagcttccaccatgttgagctgtggtgcgctgatgctgcttctgctgctggcaggttctctttcgctcttggtgctccactcgctgctagatctgatctgtctacaggaaatagcgctcatgcctcactcctgcttcgctcaggtgctttggccttcctcttcaccgctccatatgctcccccacctcaggaggctgctactgctgctgctacagcctccattccaagcttctcagctgatgccgctagaaccttcgctgctgctcatggacttgccgtgaggtctgttggtgttcgcgtggctgatgctgctgaggctttcagagtttccgttgccggcggagctaggccagctttcgctcctgctgatttgggacatggtttcggcctggctgaggttgagctttacggtgacgtggttctccgcttcgtgtcttacccagatgagactgacctgcctttccttcccggcttcgagagagtttcctctcctggtgccgtggattacggcctgacaaggttcgaccacgtggttggaaacgttcccgagatggctccagtgatcgattacatgaagggcttccttggattccatgagttcgccgagttcactgctgaggacgtgggaaccactgagtccggtttgaactctgtggttctcgccaacaattctgaggctgttttgctccctctgaatgagcctgtgcatggaaccaagaggagaagccagattcaaacttacctggagtaccacggtggccctggagttcagcatatcgcccttgcttctaatgatgtgttgcgcacactcagagagatgcgcgccagaacccccatgggaggtttcgagttcatggccccaccacaggctaagtactacgagggcgttagaaggattgctggagacgtgttgagcgaggagcagatcaaggagtgccaagagctgggtgttcttgtggatagggatgaccagggcgttctgcttcaaattaagactaagccagtgggcgaccgccctacattcttccttgagatgattcaaagaatcggctgcatggagaaggatgaggttggacaggagtaccaaaagggcggatgcggtggcttcggaaagggtaacttcagcgagttgttcaagtcaatcgaggactacgagaagagcctcgaggtgaagcagtcagtggttgcccaaaagtcctga

SEQ ID NO: 254 - DNA, 1323 bp, Artificial Sequence
  AsHPPDm-F372R Nucleotide Sequence
atgccacctactccagctacagctactggtgctgctgctgctgccgttactcctgagcacgctgccaggtcattccccagggtggttcgcgtgaaccccagatctgataggttcccagttctgagcttccaccatgttgagctgtggtgcgctgatgctgcttctgctgctggcaggttctctttcgctcttggtgctccactcgctgctagatctgatctgtctacaggaaatagcgctcatgcctcactcctgcttcgctcaggtgctttggccttcctcttcaccgctccatatgctcccccacctcaggaggctgctactgctgctgctacagcctccattccaagcttctcagctgatgccgctagaaccttcgctgctgctcatggacttgccgtgaggtctgttggtgttcgcgtggctgatgctgctgaggctttcagagtttccgttgccggcggagctaggccagctttcgctcctgctgatttgggacatggtttcggcctggctgaggttgagctttacggtgacgtggttctccgcttcgtgtcttacccagatgagactgacctgcctttccttcccggcttcgagagagtttcctctcctggtgccgtggattacggcctgacaaggttcgaccacgtggttggaaacgttcccgagatggctccagtgatcgattacatgaagggcttccttggattccatgagttcgccgagttcactgctgaggacgtgggaaccactgagtccggtttgaactctgtggttctcgccaacaattctgaggctgttttgctccctctgaatgagcctgtgcatggaaccaagaggagaagccagattcaaacttacctggagtaccacggtggccctggagttcagcatatcgcccttgcttctaatgatgtgttgcgcacactcagagagatgcgcgccagaacccccatgggaggtttcgagttcatggccccaccacaggctaagtactacgagggcgttagaaggattgctggagacgtgttgagcgaggagcagatcaaggagtgccaagagctgggtgttcttgtggatagggatgaccagggcgttctgcttcaaattcgcactaagccagtgggcgaccgccctacattcttccttgagatgattcaaagaatcggctgcatggagaaggatgaggttggacaggagtaccaaaagggcggatgcggtggcttcggaaagggtaacttcagcgagttgttcaagtcaatcgaggactacgagaagagcctcgaggtgaagcagtcagtggttgcccaaaagtcctga

SEQ ID NO: 255 - DNA, 1323 bp, Artificial Sequence
  AsHPPDm-F372H Nucleotide Sequence
atgccacctactccagctacagctactggtgctgctgctgctgccgttactcctgagcacgctgccaggtcattccccagggtggttcgcgtgaaccccagatctgataggttcccagttctgagcttccaccatgttgagctgtggtgcgctgatgctgcttctgctgctggcaggttctctttcgctcttggtgctccactcgctgctagatctgatctgtctacaggaaatagcgctcatgcctcactcctgcttcgctcaggtgctttggccttcctcttcaccgctccatatgctcccccacctcaggaggctgctactgctgctgctacagcctccattccaagcttctcagctgatgccgctagaaccttcgctgctgctcatggacttgccgtgaggtctgttggtgttcgcgtggctgatgctgctgaggctttcagagtttccgttgccggcggagctaggccagctttcgctcctgctgatttgggacatggtttcggcctggctgaggttgagctttacggtgacgtggttctccgcttcgtgtcttacccagatgagactgacctgcctttccttcccggcttcgagagagtttcctctcctggtgccgtggattacggcctgacaaggttcgaccacgtggttggaaacgttcccgagatggctccagtgatcgattacatgaagggcttccttggattccatgagttcgccgagttcactgctgaggacgtgggaaccactgagtccggtttgaactctgtggttctcgccaacaattctgaggctgttttgctccctctgaatgagcctgtgcatggaaccaagaggagaagccagattcaaacttacctggagtaccacggtggccctggagttcagcatatcgcccttgcttctaatgatgtgttgcgcacactcagagagatgcgcgccagaacccccatgggaggtttcgagttcatggccccaccacaggctaagtactacgagggcgttagaaggattgctggagacgtgttgagcgaggagcagatcaaggagtgccaagagctgggtgttcttgtggatagggatgaccagggcgttctgcttcaaattcacactaagccagtgggcgaccgccctacattcttccttgagatgattcaaagaatcggctgcatggagaaggatgaggttggacaggagtaccaaaagggcggatgcggtggcttcggaaagggtaacttcagcgagttgttcaagtcaatcgaggactacgagaagagcctcgaggtgaagcagtcagtggttgcccaaaagtcctga

SEQ ID NO: 256 - DNA, 1320 bp, Artificial Sequence
  AsHPPDm-F372 Nucleotide Sequence
atgccacctactccagctacagctactggtgctgctgctgctgccgttactcctgagcacgctgccaggtcattccccagggtggttcgcgtgaaccccagatctgataggttcccagttctgagcttccaccatgttgagctgtggtgcgctgatgctgcttctgctgctggcaggttctctttcgctcttggtgctccactcgctgctagatctgatctgtctacaggaaatagcgctcatgcctcactcctgcttcgctcaggtgctttggccttcctcttcaccgctccatatgctcccccacctcaggaggctgctactgctgctgctacagcctccattccaagcttctcagctgatgccgctagaaccttcgctgctgctcatggacttgccgtgaggtctgttggtgttcgcgtggctgatgctgctgaggctttcagagtttccgttgccggcggagctaggccagctttcgctcctgctgatttgggacatggtttcggcctggctgaggttgagctttacggtgacgtggttctccgcttcgtgtcttacccagatgagactgacctgcctttccttcccggcttcgagagagtttcctctcctggtgccgtggattacggcctgacaaggttcgaccacgtggttggaaacgttcccgagatggctccagtgatcgattacatgaagggcttccttggattccatgagttcgccgagttcactgctgaggacgtgggaaccactgagtccggtttgaactctgtggttctcgccaacaattctgaggctgttttgctccctctgaatgagcctgtgcatggaaccaagaggagaagccagattcaaacttacctggagtaccacggtggccctggagttcagcatatcgcccttgcttctaatgatgtgttgcgcacactcagagagatgcgcgccagaacccccatgggaggtttcgagttcatggccccaccacaggctaagtactacgagggcgttagaaggattgctggagacgtgttgagcgaggagcagatcaaggagtgccaagagctgggtgttcttgtggatagggatgaccagggcgttctgcttcaaattactaagccagtgggcgaccgccctacattcttccttgagatgattcaaagaatcggctgcatggagaaggatgaggttggacaggagtaccaaaagggcggatgcggtggcttcggaaagggtaacttcagcgagttgttcaagtcaatcgaggactacgagaagagcctcgaggtgaagcagtcagtggttgcccaaaagtcctga

SEQ ID NO: 257 - protein, 358 aa, Artificial Sequence
  PfHPPDm-F372G Amino Acid Sequence
MADLYENPMGLMGFEFIEFASPTPGTLEPIFEIMGFTKVATHRSKNVHLYRQGEINLILNNEPNSIASYFAAEHGPSVCGMAFRVKDSQKAYNRALELGAQPIHIDTGPMELNLPAIKGIGGAPLYLIDRFGEGSSIYDIDFVYLEGVERNPVGAGLKVIDHLTHNVYRGRMVYWANFYEKLFNFREARYFDIKGEYTGLTSKAMSAPDGMIRIPLNEESSKGAGQIEEFLMQFNGEGIQHVAFLTDDLVKTWDALKKIGMRFMTAPPDTYYEMLEGRLPDHGEPVDQLQARGILLDGSSVEGDKRLLLQIGSETLMGPVFFEFIQRKGDDGFGEGNFKALFESIERDQVRRGVLTAD

SEQ ID NO: 258 - protein, 358 aa, Artificial Sequence
  PfHPPDm-F372V Amino Acid Sequence
MADLYENPMGLMGFEFIEFASPTPGTLEPIFEIMGFTKVATHRSKNVHLYRQGEINLILNNEPNSIASYFAAEHGPSVCGMAFRVKDSQKAYNRALELGAQPIHIDTGPMELNLPAIKGIGGAPLYLIDRFGEGSSIYDIDFVYLEGVERNPVGAGLKVIDHLTHNVYRGRMVYWANFYEKLFNFREARYFDIKGEYTGLTSKAMSAPDGMIRIPLNEESSKGAGQIEEFLMQFNGEGIQHVAFLTDDLVKTWDALKKIGMRFMTAPPDTYYEMLEGRLPDHGEPVDQLQARGILLDGSSVEGDKRLLLQIVSETLMGPVFFEFIQRKGDDGFGEGNFKALFESIERDQVRRGVLTAD

SEQ ID NO: 259 - protein, 358 aa, Artificial Sequence
  PfHPPDm-F372L Amino Acid Sequence
MADLYENPMGLMGFEFIEFASPTPGTLEPIFEIMGFTKVATHRSKNVHLYRQGEINLILNNEPNSIASYFAAEHGPSVCGMAFRVKDSQKAYNRALELGAQPIHIDTGPMELNLPAIKGIGGAPLYLIDRFGEGSSIYDIDFVYLEGVERNPVGAGLKVIDHLTHNVYRGRMVYWANFYEKLFNFREARYFDIKGEYTGLTSKAMSAPDGMIRIPLNEESSKGAGQIEEFLMQFNGEGIQHVAFLTDDLVKTWDALKKIGMRFMTAPPDTYYEMLEGRLPDHGEPVDQLQARGILLDGSSVEGDKRLLLQILSETLMGPVFFEFIQRKGDDGFGEGNFKALFESIERDQVRRGVLTAD

SEQ ID NO: 260 - protein, 358 aa, Artificial Sequence
  PfHPPDm-F372I Amino Acid Sequence
MADLYENPMGLMGFEFIEFASPTPGTLEPIFEIMGFTKVATHRSKNVHLYRQGEINLILNNEPNSIASYFAAEHGPSVCGMAFRVKDSQKAYNRALELGAQPIHIDTGPMELNLPAIKGIGGAPLYLIDRFGEGSSIYDIDFVYLEGVERNPVGAGLKVIDHLTHNVYRGRMVYWANFYEKLFNFREARYFDIKGEYTGLTSKAMSAPDGMIRIPLNEESSKGAGQIEEFLMQFNGEGIQHVAFLTDDLVKTWDALKKIGMRFMTAPPDTYYEMLEGRLPDHGEPVDQLQARGILLDGSSVEGDKRLLLQIISETLMGPVFFEFIQRKGDDGFGEGNFKALFESIERDQVRRGVLTAD

SEQ ID NO: 261 - protein, 358 aa, Artificial Sequence
  PfHPPDm-F372P Amino Acid Sequence
MADLYENPMGLMGFEFIEFASPTPGTLEPIFEIMGFTKVATHRSKNVHLYRQGEINLILNNEPNSIASYFAAEHGPSVCGMAFRVKDSQKAYNRALELGAQPIHIDTGPMELNLPAIKGIGGAPLYLIDRFGEGSSIYDIDFVYLEGVERNPVGAGLKVIDHLTHNVYRGRMVYWANFYEKLFNFREARYFDIKGEYTGLTSKAMSAPDGMIRIPLNEESSKGAGQIEEFLMQFNGEGIQHVAFLTDDLVKTWDALKKIGMRFMTAPPDTYYEMLEGRLPDHGEPVDQLQARGILLDGSSVEGDKRLLLQIPSETLMGPVFFEFIQRKGDDGFGEGNFKALFESIERDQVRRGVLTAD

SEQ ID NO: 262 - protein, 358 aa, Artificial Sequence
  PfHPPDm-F372Y Amino Acid Sequence
MADLYENPMGLMGFEFIEFASPTPGTLEPIFEIMGFTKVATHRSKNVHLYRQGEINLILNNEPNSIASYFAAEHGPSVCGMAFRVKDSQKAYNRALELGAQPIHIDTGPMELNLPAIKGIGGAPLYLIDRFGEGSSIYDIDFVYLEGVERNPVGAGLKVIDHLTHNVYRGRMVYWANFYEKLFNFREARYFDIKGEYTGLTSKAMSAPDGMIRIPLNEESSKGAGQIEEFLMQFNGEGIQHVAFLTDDLVKTWDALKKIGMRFMTAPPDTYYEMLEGRLPDHGEPVDQLQARGILLDGSSVEGDKRLLLQIYSETLMGPVFFEFIQRKGDDGFGEGNFKALFESIERDQVRRGVLTAD

SEQ ID NO: 263 - protein, 358 aa, Artificial Sequence
  PfHPPDm-F372W Amino Acid Sequence
MADLYENPMGLMGFEFIEFASPTPGTLEPIFEIMGFTKVATHRSKNVHLYRQGEINLILNNEPNSIASYFAAEHGPSVCGMAFRVKDSQKAYNRALELGAQPIHIDTGPMELNLPAIKGIGGAPLYLIDRFGEGSSIYDIDFVYLEGVERNPVGAGLKVIDHLTHNVYRGRMVYWANFYEKLFNFREARYFDIKGEYTGLTSKAMSAPDGMIRIPLNEESSKGAGQIEEFLMQFNGEGIQHVAFLTDDLVKTWDALKKIGMRFMTAPPDTYYEMLEGRLPDHGEPVDQLQARGILLDGSSVEGDKRLLLQIWSETLMGPVFFEFIQRKGDDGFGEGNFKALFESIERDQVRRGVLTAD

SEQ ID NO: 264 - protein, 358 aa, Artificial Sequence
  PfHPPDm-F372S Amino Acid Sequence
MADLYENPMGLMGFEFIEFASPTPGTLEPIFEIMGFTKVATHRSKNVHLYRQGEINLILNNEPNSIASYFAAEHGPSVCGMAFRVKDSQKAYNRALELGAQPIHIDTGPMELNLPAIKGIGGAPLYLIDRFGEGSSIYDIDFVYLEGVERNPVGAGLKVIDHLTHNVYRGRMVYWANFYEKLFNFREARYFDIKGEYTGLTSKAMSAPDGMIRIPLNEESSKGAGQIEEFLMQFNGEGIQHVAFLTDDLVKTWDALKKIGMRFMTAPPDTYYEMLEGRLPDHGEPVDQLQARGILLDGSSVEGDKRLLLQISSETLMGPVFFEFIQRKGDDGFGEGNFKALFESIERDQVRRGVLTAD

SEQ ID NO: 265 - protein, 358 aa, Artificial Sequence
  PfHPPDm-F372T Amino Acid Sequence
MADLYENPMGLMGFEFIEFASPTPGTLEPIFEIMGFTKVATHRSKNVHLYRQGEINLILNNEPNSIASYFAAEHGPSVCGMAFRVKDSQKAYNRALELGAQPIHIDTGPMELNLPAIKGIGGAPLYLIDRFGEGSSIYDIDFVYLEGVERNPVGAGLKVIDHLTHNVYRGRMVYWANFYEKLFNFREARYFDIKGEYTGLTSKAMSAPDGMIRIPLNEESSKGAGQIEEFLMQFNGEGIQHVAFLTDDLVKTWDALKKIGMRFMTAPPDTYYEMLEGRLPDHGEPVDQLQARGILLDGSSVEGDKRLLLQITSETLMGPVFFEFIQRKGDDGFGEGNFKALFESIERDQVRRGVLTAD

SEQ ID NO: 266 - protein, 358 aa, Artificial Sequence
  PfHPPDm-F372C Amino Acid Sequence
MADLYENPMGLMGFEFIEFASPTPGTLEPIFEIMGFTKVATHRSKNVHLYRQGEINLILNNEPNSIASYFAAEHGPSVCGMAFRVKDSQKAYNRALELGAQPIHIDTGPMELNLPAIKGIGGAPLYLIDRFGEGSSIYDIDFVYLEGVERNPVGAGLKVIDHLTHNVYRGRMVYWANFYEKLFNFREARYFDIKGEYTGLTSKAMSAPDGMIRIPLNEESSKGAGQIEEFLMQFNGEGIQHVAFLTDDLVKTWDALKKIGMRFMTAPPDTYYEMLEGRLPDHGEPVDQLQARGILLDGSSVEGDKRLLLQICSETLMGPVFFEFIQRKGDDGFGEGNFKALFESIERDQVRRGVLTAD

SEQ ID NO: 267 - protein, 358 aa, Artificial Sequence
  PfHPPDm-F372M Amino Acid Sequence
MADLYENPMGLMGFEFIEFASPTPGTLEPIFEIMGFTKVATHRSKNVHLYRQGEINLILNNEPNSIASYFAAEHGPSVCGMAFRVKDSQKAYNRALELGAQPIHIDTGPMELNLPAIKGIGGAPLYLIDRFGEGSSIYDIDFVYLEGVERNPVGAGLKVIDHLTHNVYRGRMVYWANFYEKLFNFREARYFDIKGEYTGLTSKAMSAPDGMIRIPLNEESSKGAGQIEEFLMQFNGEGIQHVAFLTDDLVKTWDALKKIGMRFMTAPPDTYYEMLEGRLPDHGEPVDQLQARGILLDGSSVEGDKRLLLQIMSETLMGPVFFEFIQRKGDDGFGEGNFKALFESIERDQVRRGVLTAD

SEQ ID NO: 268 - protein, 358 aa, Artificial Sequence
  PfHPPDm-F372N Amino Acid Sequence
MADLYENPMGLMGFEFIEFASPTPGTLEPIFEIMGFTKVATHRSKNVHLYRQGEINLILNNEPNSIASYFAAEHGPSVCGMAFRVKDSQKAYNRALELGAQPIHIDTGPMELNLPAIKGIGGAPLYLIDRFGEGSSIYDIDFVYLEGVERNPVGAGLKVIDHLTHNVYRGRMVYWANFYEKLFNFREARYFDIKGEYTGLTSKAMSAPDGMIRIPLNEESSKGAGQIEEFLMQFNGEGIQHVAFLTDDLVKTWDALKKIGMRFMTAPPDTYYEMLEGRLPDHGEPVDQLQARGILLDGSSVEGDKRLLLQINSETLMGPVFFEFIQRKGDDGFGEGNFKALFESIERDQVRRGVLTAD

SEQ ID NO: 269 - protein, 358 aa, Artificial Sequence
  PfHPPDm-F372Q Amino Acid Sequence
MADLYENPMGLMGFEFIEFASPTPGTLEPIFEIMGFTKVATHRSKNVHLYRQGEINLILNNEPNSIASYFAAEHGPSVCGMAFRVKDSQKAYNRALELGAQPIHIDTGPMELNLPAIKGIGGAPLYLIDRFGEGSSIYDIDFVYLEGVERNPVGAGLKVIDHLTHNVYRGRMVYWANFYEKLFNFREARYFDIKGEYTGLTSKAMSAPDGMIRIPLNEESSKGAGQIEEFLMQFNGEGIQHVAFLTDDLVKTWDALKKIGMRFMTAPPDTYYEMLEGRLPDHGEPVDQLQARGILLDGSSVEGDKRLLLQIQSETLMGPVFFEFIQRKGDDGFGEGNFKALFESIERDQVRRGVLTAD

SEQ ID NO: 270 - protein, 358 aa, Artificial Sequence
  PfHPPDm-F372D Amino Acid Sequence
MADLYENPMGLMGFEFIEFASPTPGTLEPIFEIMGFTKVATHRSKNVHLYRQGEINLILNNEPNSIASYFAAEHGPSVCGMAFRVKDSQKAYNRALELGAQPIHIDTGPMELNLPAIKGIGGAPLYLIDRFGEGSSIYDIDFVYLEGVERNPVGAGLKVIDHLTHNVYRGRMVYWANFYEKLFNFREARYFDIKGEYTGLTSKAMSAPDGMIRIPLNEESSKGAGQIEEFLMQFNGEGIQHVAFLTDDLVKTWDALKKIGMRFMTAPPDTYYEMLEGRLPDHGEPVDQLQARGILLDGSSVEGDKRLLLQIDSETLMGPVFFEFIQRKGDDGFGEGNFKALFESIERDQVRRGVLTAD

SEQ ID NO: 271 - protein, 358 aa, Artificial Sequence
  PfHPPDm-F372E Amino Acid Sequence
MADLYENPMGLMGFEFIEFASPTPGTLEPIFEIMGFTKVATHRSKNVHLYRQGEINLILNNEPNSIASYFAAEHGPSVCGMAFRVKDSQKAYNRALELGAQPIHIDTGPMELNLPAIKGIGGAPLYLIDRFGEGSSIYDIDFVYLEGVERNPVGAGLKVIDHLTHNVYRGRMVYWANFYEKLFNFREARYFDIKGEYTGLTSKAMSAPDGMIRIPLNEESSKGAGQIEEFLMQFNGEGIQHVAFLTDDLVKTWDALKKIGMRFMTAPPDTYYEMLEGRLPDHGEPVDQLQARGILLDGSSVEGDKRLLLQIESETLMGPVFFEFIQRKGDDGFGEGNFKALFESIERDQVRRGVLTAD

SEQ ID NO: 272 - protein, 358 aa, Artificial Sequence
  PfHPPDm-F372K Amino Acid Sequence
MADLYENPMGLMGFEFIEFASPTPGTLEPIFEIMGFTKVATHRSKNVHLYRQGEINLILNNEPNSIASYFAAEHGPSVCGMAFRVKDSQKAYNRALELGAQPIHIDTGPMELNLPAIKGIGGAPLYLIDRFGEGSSIYDIDFVYLEGVERNPVGAGLKVIDHLTHNVYRGRMVYWANFYEKLFNFREARYFDIKGEYTGLTSKAMSAPDGMIRIPLNEESSKGAGQIEEFLMQFNGEGIQHVAFLTDDLVKTWDALKKIGMRFMTAPPDTYYEMLEGRLPDHGEPVDQLQARGILLDGSSVEGDKRLLLQIKSETLMGPVFFEFIQRKGDDGFGEGNFKALFESIERDQVRRGVLTAD

SEQ ID NO: 273 - protein, 358 aa, Artificial Sequence
  PfHPPDm-F372R Amino Acid Sequence
MADLYENPMGLMGFEFIEFASPTPGTLEPIFEIMGFTKVATHRSKNVHLYRQGEINLILNNEPNSIASYFAAEHGPSVCGMAFRVKDSQKAYNRALELGAQPIHIDTGPMELNLPAIKGIGGAPLYLIDRFGEGSSIYDIDFVYLEGVERNPVGAGLKVIDHLTHNVYRGRMVYWANFYEKLFNFREARYFDIKGEYTGLTSKAMSAPDGMIRIPLNEESSKGAGQIEEFLMQFNGEGIQHVAFLTDDLVKTWDALKKIGMRFMTAPPDTYYEMLEGRLPDHGEPVDQLQARGILLDGSSVEGDKRLLLQIRSETLMGPVFFEFIQRKGDDGFGEGNFKALFESIERDQVRRGVLTAD

SEQ ID NO: 274 - protein, 358 aa, Artificial Sequence
  PfHPPDm-F372H Amino Acid Sequence
MADLYENPMGLMGFEFIEFASPTPGTLEPIFEIMGFTKVATHRSKNVHLYRQGEINLILNNEPNSIASYFAAEHGPSVCGMAFRVKDSQKAYNRALELGAQPIHIDTGPMELNLPAIKGIGGAPLYLIDRFGEGSSIYDIDFVYLEGVERNPVGAGLKVIDHLTHNVYRGRMVYWANFYEKLFNFREARYFDIKGEYTGLTSKAMSAPDGMIRIPLNEESSKGAGQIEEFLMQFNGEGIQHVAFLTDDLVKTWDALKKIGMRFMTAPPDTYYEMLEGRLPDHGEPVDQLQARGILLDGSSVEGDKRLLLQIHSETLMGPVFFEFIQRKGDDGFGEGNFKALFESIERDQVRRGVLTAD

SEQ ID NO: 275 - protein, 357 aa, Artificial Sequence
  PfHPPDm-F372 Amino Acid Sequence
MADLYENPMGLMGFEFIEFASPTPGTLEPIFEIMGFTKVATHRSKNVHLYRQGEINLILNNEPNSIASYFAAEHGPSVCGMAFRVKDSQKAYNRALELGAQPIHIDTGPMELNLPAIKGIGGAPLYLIDRFGEGSSIYDIDFVYLEGVERNPVGAGLKVIDHLTHNVYRGRMVYWANFYEKLFNFREARYFDIKGEYTGLTSKAMSAPDGMIRIPLNEESSKGAGQIEEFLMQFNGEGIQHVAFLTDDLVKTWDALKKIGMRFMTAPPDTYYEMLEGRLPDHGEPVDQLQARGILLDGSSVEGDKRLLLQISETLMGPVFFEFIQRKGDDGFGEGNFKALFESIERDQVRRGVLTAD

SEQ ID NO: 276 - DNA, 1077 bp, Artificial Sequence
  PfHPPDm-F372G Nucleotide Sequence
atggccgatttgtacgagaacccaatgggactcatgggtttcgagttcattgagttcgcttcccccaccccaggtactttggagcctattttcgagatcatgggcttcactaaggttgccacacacaggtctaagaatgtgcatctctaccgccaaggagagattaacctgatccttaacaatgagcctaatagcatcgcctcatacttcgctgctgagcatggtccatctgtttgcggcatggctttcagagtgaaggattcacaaaaggcctacaacagggctttggagctcggcgcccagcccattcatatcgacaccggacctatggagctgaatcttcctgccattaagggcatcggcggagctccattgtacctcattgatcgcttcggcgagggctcctctatctacgatatcgacttcgtgtacctggagggcgttgagagaaaccctgtgggagctggtctgaaggttatcgaccaccttactcataatgtttacagaggaaggatggtgtactgggccaacttctacgagaagctgttcaatttccgcgaggctagatacttcgatattaagggcgagtacacaggacttacctccaaggccatgtctgctcccgacggtatgattaggatcccattgaacgaggagagctcaaagggcgccggacagattgaggagttcctcatgcaattcaatggtgaaggcatccagcacgttgctttcctgacagatgaccttgtgaagacctgggatgccctcaagaagattggcatgaggttcatgaccgctccacctgacacttactacgagatgttggagggacgcctccctgatcatggcgagcccgttgaccagctgcaagctagaggaatcctcctggatggttcctctgtggagggcgacaagaggcttttgctccaaattggcagcgagactcttatgggacccgtgttcttcgagttcatccagaggaagggcgatgacggattcggcgagggcaacttcaaggccctgttcgagtctattgagagagatcaggtgaggcgcggcgttcttacagctgactga

SEQ ID NO: 277 - DNA, 1077 bp, Artificial Sequence
  PfHPPDm-F372V Nucleotide Sequence
atggccgatttgtacgagaacccaatgggactcatgggtttcgagttcattgagttcgcttcccccaccccaggtactttggagcctattttcgagatcatgggcttcactaaggttgccacacacaggtctaagaatgtgcatctctaccgccaaggagagattaacctgatccttaacaatgagcctaatagcatcgcctcatacttcgctgctgagcatggtccatctgtttgcggcatggctttcagagtgaaggattcacaaaaggcctacaacagggctttggagctcggcgcccagcccattcatatcgacaccggacctatggagctgaatcttcctgccattaagggcatcggcggagctccattgtacctcattgatcgcttcggcgagggctcctctatctacgatatcgacttcgtgtacctggagggcgttgagagaaaccctgtgggagctggtctgaaggttatcgaccaccttactcataatgtttacagaggaaggatggtgtactgggccaacttctacgagaagctgttcaatttccgcgaggctagatacttcgatattaagggcgagtacacaggacttacctccaaggccatgtctgctcccgacggtatgattaggatcccattgaacgaggagagctcaaagggcgccggacagattgaggagttcctcatgcaattcaatggtgaaggcatccagcacgttgctttcctgacagatgaccttgtgaagacctgggatgccctcaagaagattggcatgaggttcatgaccgctccacctgacacttactacgagatgttggagggacgcctccctgatcatggcgagcccgttgaccagctgcaagctagaggaatcctcctggatggttcctctgtggagggcgacaagaggcttttgctccaaattgtcagcgagactcttatgggacccgtgttcttcgagttcatccagaggaagggcgatgacggattcggcgagggcaacttcaaggccctgttcgagtctattgagagagatcaggtgaggcgcggcgttcttacagctgactga

SEQ ID NO: 278 - DNA, 1077 bp, Artificial Sequence
  PfHPPDm-F372L Nucleotide Sequence
atggccgatttgtacgagaacccaatgggactcatgggtttcgagttcattgagttcgcttcccccaccccaggtactttggagcctattttcgagatcatgggcttcactaaggttgccacacacaggtctaagaatgtgcatctctaccgccaaggagagattaacctgatccttaacaatgagcctaatagcatcgcctcatacttcgctgctgagcatggtccatctgtttgcggcatggctttcagagtgaaggattcacaaaaggcctacaacagggctttggagctcggcgcccagcccattcatatcgacaccggacctatggagctgaatcttcctgccattaagggcatcggcggagctccattgtacctcattgatcgcttcggcgagggctcctctatctacgatatcgacttcgtgtacctggagggcgttgagagaaaccctgtgggagctggtctgaaggttatcgaccaccttactcataatgtttacagaggaaggatggtgtactgggccaacttctacgagaagctgttcaatttccgcgaggctagatacttcgatattaagggcgagtacacaggacttacctccaaggccatgtctgctcccgacggtatgattaggatcccattgaacgaggagagctcaaagggcgccggacagattgaggagttcctcatgcaattcaatggtgaaggcatccagcacgttgctttcctgacagatgaccttgtgaagacctgggatgccctcaagaagattggcatgaggttcatgaccgctccacctgacacttactacgagatgttggagggacgcctccctgatcatggcgagcccgttgaccagctgcaagctagaggaatcctcctggatggttcctctgtggagggcgacaagaggcttttgctccaaattctcagcgagactcttatgggacccgtgttcttcgagttcatccagaggaagggcgatgacggattcggcgagggcaacttcaaggccctgttcgagtctattgagagagatcaggtgaggcgcggcgttcttacagctgactga

SEQ ID NO: 279 - DNA, 1077 bp, Artificial Sequence
  PfHPPDm-F372I Nucleotide Sequence
atggccgatttgtacgagaacccaatgggactcatgggtttcgagttcattgagttcgcttcccccaccccaggtactttggagcctattttcgagatcatgggcttcactaaggttgccacacacaggtctaagaatgtgcatctctaccgccaaggagagattaacctgatccttaacaatgagcctaatagcatcgcctcatacttcgctgctgagcatggtccatctgtttgcggcatggctttcagagtgaaggattcacaaaaggcctacaacagggctttggagctcggcgcccagcccattcatatcgacaccggacctatggagctgaatcttcctgccattaagggcatcggcggagctccattgtacctcattgatcgcttcggcgagggctcctctatctacgatatcgacttcgtgtacctggagggcgttgagagaaaccctgtgggagctggtctgaaggttatcgaccaccttactcataatgtttacagaggaaggatggtgtactgggccaacttctacgagaagctgttcaatttccgcgaggctagatacttcgatattaagggcgagtacacaggacttacctccaaggccatgtctgctcccgacggtatgattaggatcccattgaacgaggagagctcaaagggcgccggacagattgaggagttcctcatgcaattcaatggtgaaggcatccagcacgttgctttcctgacagatgaccttgtgaagacctgggatgccctcaagaagattggcatgaggttcatgaccgctccacctgacacttactacgagatgttggagggacgcctccctgatcatggcgagcccgttgaccagctgcaagctagaggaatcctcctggatggttcctctgtggagggcgacaagaggcttttgctccaaattatcagcgagactcttatgggacccgtgttcttcgagttcatccagaggaagggcgatgacggattcggcgagggcaacttcaaggccctgttcgagtctattgagagagatcaggtgaggcgcggcgttcttacagctgactga

SEQ ID NO: 280 - DNA, 1077 bp, Artificial Sequence
  PfHPPDm-F372P Nucleotide Sequence
atggccgatttgtacgagaacccaatgggactcatgggtttcgagttcattgagttcgcttcccccaccccaggtactttggagcctattttcgagatcatgggcttcactaaggttgccacacacaggtctaagaatgtgcatctctaccgccaaggagagattaacctgatccttaacaatgagcctaatagcatcgcctcatacttcgctgctgagcatggtccatctgtttgcggcatggctttcagagtgaaggattcacaaaaggcctacaacagggctttggagctcggcgcccagcccattcatatcgacaccggacctatggagctgaatcttcctgccattaagggcatcggcggagctccattgtacctcattgatcgcttcggcgagggctcctctatctacgatatcgacttcgtgtacctggagggcgttgagagaaaccctgtgggagctggtctgaaggttatcgaccaccttactcataatgtttacagaggaaggatggtgtactgggccaacttctacgagaagctgttcaatttccgcgaggctagatacttcgatattaagggcgagtacacaggacttacctccaaggccatgtctgctcccgacggtatgattaggatcccattgaacgaggagagctcaaagggcgccggacagattgaggagttcctcatgcaattcaatggtgaaggcatccagcacgttgctttcctgacagatgaccttgtgaagacctgggatgccctcaagaagattggcatgaggttcatgaccgctccacctgacacttactacgagatgttggagggacgcctccctgatcatggcgagcccgttgaccagctgcaagctagaggaatcctcctggatggttcctctgtggagggcgacaagaggcttttgctccaaattcctagcgagactcttatgggacccgtgttcttcgagttcatccagaggaagggcgatgacggattcggcgagggcaacttcaaggccctgttcgagtctattgagagagatcaggtgaggcgcggcgttcttacagctgactga

SEQ ID NO: 281 - DNA, 1077 bp, Artificial Sequence
  PfHPPDm-F372Y Nucleotide Sequence
atggccgatttgtacgagaacccaatgggactcatgggtttcgagttcattgagttcgcttcccccaccccaggtactttggagcctattttcgagatcatgggcttcactaaggttgccacacacaggtctaagaatgtgcatctctaccgccaaggagagattaacctgatccttaacaatgagcctaatagcatcgcctcatacttcgctgctgagcatggtccatctgtttgcggcatggctttcagagtgaaggattcacaaaaggcctacaacagggctttggagctcggcgcccagcccattcatatcgacaccggacctatggagctgaatcttcctgccattaagggcatcggcggagctccattgtacctcattgatcgcttcggcgagggctcctctatctacgatatcgacttcgtgtacctggagggcgttgagagaaaccctgtgggagctggtctgaaggttatcgaccaccttactcataatgtttacagaggaaggatggtgtactgggccaacttctacgagaagctgttcaatttccgcgaggctagatacttcgatattaagggcgagtacacaggacttacctccaaggccatgtctgctcccgacggtatgattaggatcccattgaacgaggagagctcaaagggcgccggacagattgaggagttcctcatgcaattcaatggtgaaggcatccagcacgttgctttcctgacagatgaccttgtgaagacctgggatgccctcaagaagattggcatgaggttcatgaccgctccacctgacacttactacgagatgttggagggacgcctccctgatcatggcgagcccgttgaccagctgcaagctagaggaatcctcctggatggttcctctgtggagggcgacaagaggcttttgctccaaatttacagcgagactcttatgggacccgtgttcttcgagttcatccagaggaagggcgatgacggattcggcgagggcaacttcaaggccctgttcgagtctattgagagagatcaggtgaggcgcggcgttcttacagctgactga

SEQ ID NO: 282 - DNA, 1077 bp, Artificial Sequence
  PfHPPDm-F372W Nucleotide Sequence
atggccgatttgtacgagaacccaatgggactcatgggtttcgagttcattgagttcgcttcccccaccccaggtactttggagcctattttcgagatcatgggcttcactaaggttgccacacacaggtctaagaatgtgcatctctaccgccaaggagagattaacctgatccttaacaatgagcctaatagcatcgcctcatacttcgctgctgagcatggtccatctgtttgcggcatggctttcagagtgaaggattcacaaaaggcctacaacagggctttggagctcggcgcccagcccattcatatcgacaccggacctatggagctgaatcttcctgccattaagggcatcggcggagctccattgtacctcattgatcgcttcggcgagggctcctctatctacgatatcgacttcgtgtacctggagggcgttgagagaaaccctgtgggagctggtctgaaggttatcgaccaccttactcataatgtttacagaggaaggatggtgtactgggccaacttctacgagaagctgttcaatttccgcgaggctagatacttcgatattaagggcgagtacacaggacttacctccaaggccatgtctgctcccgacggtatgattaggatcccattgaacgaggagagctcaaagggcgccggacagattgaggagttcctcatgcaattcaatggtgaaggcatccagcacgttgctttcctgacagatgaccttgtgaagacctgggatgccctcaagaagattggcatgaggttcatgaccgctccacctgacacttactacgagatgttggagggacgcctccctgatcatggcgagcccgttgaccagctgcaagctagaggaatcctcctggatggttcctctgtggagggcgacaagaggcttttgctccaaatttggagcgagactcttatgggacccgtgttcttcgagttcatccagaggaagggcgatgacggattcggcgagggcaacttcaaggccctgttcgagtctattgagagagatcaggtgaggcgcggcgttcttacagctgactga

SEQ ID NO: 283 - DNA, 1077 bp, Artificial Sequence
  PfHPPDm-F372S Nucleotide Sequence
atggccgatttgtacgagaacccaatgggactcatgggtttcgagttcattgagttcgcttcccccaccccaggtactttggagcctattttcgagatcatgggcttcactaaggttgccacacacaggtctaagaatgtgcatctctaccgccaaggagagattaacctgatccttaacaatgagcctaatagcatcgcctcatacttcgctgctgagcatggtccatctgtttgcggcatggctttcagagtgaaggattcacaaaaggcctacaacagggctttggagctcggcgcccagcccattcatatcgacaccggacctatggagctgaatcttcctgccattaagggcatcggcggagctccattgtacctcattgatcgcttcggcgagggctcctctatctacgatatcgacttcgtgtacctggagggcgttgagagaaaccctgtgggagctggtctgaaggttatcgaccaccttactcataatgtttacagaggaaggatggtgtactgggccaacttctacgagaagctgttcaatttccgcgaggctagatacttcgatattaagggcgagtacacaggacttacctccaaggccatgtctgctcccgacggtatgattaggatcccattgaacgaggagagctcaaagggcgccggacagattgaggagttcctcatgcaattcaatggtgaaggcatccagcacgttgctttcctgacagatgaccttgtgaagacctgggatgccctcaagaagattggcatgaggttcatgaccgctccacctgacacttactacgagatgttggagggacgcctccctgatcatggcgagcccgttgaccagctgcaagctagaggaatcctcctggatggttcctctgtggagggcgacaagaggcttttgctccaaatttccagcgagactcttatgggacccgtgttcttcgagttcatccagaggaagggcgatgacggattcggcgagggcaacttcaaggccctgttcgagtctattgagagagatcaggtgaggcgcggcgttcttacagctgactga

SEQ ID NO: 284 - DNA, 1077 bp, Artificial Sequence
  PfHPPDm-F372T Nucleotide Sequence
atggccgatttgtacgagaacccaatgggactcatgggtttcgagttcattgagttcgcttcccccaccccaggtactttggagcctattttcgagatcatgggcttcactaaggttgccacacacaggtctaagaatgtgcatctctaccgccaaggagagattaacctgatccttaacaatgagcctaatagcatcgcctcatacttcgctgctgagcatggtccatctgtttgcggcatggctttcagagtgaaggattcacaaaaggcctacaacagggctttggagctcggcgcccagcccattcatatcgacaccggacctatggagctgaatcttcctgccattaagggcatcggcggagctccattgtacctcattgatcgcttcggcgagggctcctctatctacgatatcgacttcgtgtacctggagggcgttgagagaaaccctgtgggagctggtctgaaggttatcgaccaccttactcataatgtttacagaggaaggatggtgtactgggccaacttctacgagaagctgttcaatttccgcgaggctagatacttcgatattaagggcgagtacacaggacttacctccaaggccatgtctgctcccgacggtatgattaggatcccattgaacgaggagagctcaaagggcgccggacagattgaggagttcctcatgcaattcaatggtgaaggcatccagcacgttgctttcctgacagatgaccttgtgaagacctgggatgccctcaagaagattggcatgaggttcatgaccgctccacctgacacttactacgagatgttggagggacgcctccctgatcatggcgagcccgttgaccagctgcaagctagaggaatcctcctggatggttcctctgtggagggcgacaagaggcttttgctccaaattaccagcgagactcttatgggacccgtgttcttcgagttcatccagaggaagggcgatgacggattcggcgagggcaacttcaaggccctgttcgagtctattgagagagatcaggtgaggcgcggcgttcttacagctgactga

SEQ ID NO: 285 - DNA, 1077 bp, Artificial Sequence
  PfHPPDm-F372C Nucleotide Sequence
atggccgatttgtacgagaacccaatgggactcatgggtttcgagttcattgagttcgcttcccccaccccaggtactttggagcctattttcgagatcatgggcttcactaaggttgccacacacaggtctaagaatgtgcatctctaccgccaaggagagattaacctgatccttaacaatgagcctaatagcatcgcctcatacttcgctgctgagcatggtccatctgtttgcggcatggctttcagagtgaaggattcacaaaaggcctacaacagggctttggagctcggcgcccagcccattcatatcgacaccggacctatggagctgaatcttcctgccattaagggcatcggcggagctccattgtacctcattgatcgcttcggcgagggctcctctatctacgatatcgacttcgtgtacctggagggcgttgagagaaaccctgtgggagctggtctgaaggttatcgaccaccttactcataatgtttacagaggaaggatggtgtactgggccaacttctacgagaagctgttcaatttccgcgaggctagatacttcgatattaagggcgagtacacaggacttacctccaaggccatgtctgctcccgacggtatgattaggatcccattgaacgaggagagctcaaagggcgccggacagattgaggagttcctcatgcaattcaatggtgaaggcatccagcacgttgctttcctgacagatgaccttgtgaagacctgggatgccctcaagaagattggcatgaggttcatgaccgctccacctgacacttactacgagatgttggagggacgcctccctgatcatggcgagcccgttgaccagctgcaagctagaggaatcctcctggatggttcctctgtggagggcgacaagaggcttttgctccaaatttgcagcgagactcttatgggacccgtgttcttcgagttcatccagaggaagggcgatgacggattcggcgagggcaacttcaaggccctgttcgagtctattgagagagatcaggtgaggcgcggcgttcttacagctgactga

SEQ ID NO: 286 - DNA, 1077 bp, Artificial Sequence
  PfHPPDm-F372M Nucleotide Sequence
atggccgatttgtacgagaacccaatgggactcatgggtttcgagttcattgagttcgcttcccccaccccaggtactttggagcctattttcgagatcatgggcttcactaaggttgccacacacaggtctaagaatgtgcatctctaccgccaaggagagattaacctgatccttaacaatgagcctaatagcatcgcctcatacttcgctgctgagcatggtccatctgtttgcggcatggctttcagagtgaaggattcacaaaaggcctacaacagggctttggagctcggcgcccagcccattcatatcgacaccggacctatggagctgaatcttcctgccattaagggcatcggcggagctccattgtacctcattgatcgcttcggcgagggctcctctatctacgatatcgacttcgtgtacctggagggcgttgagagaaaccctgtgggagctggtctgaaggttatcgaccaccttactcataatgtttacagaggaaggatggtgtactgggccaacttctacgagaagctgttcaatttccgcgaggctagatacttcgatattaagggcgagtacacaggacttacctccaaggccatgtctgctcccgacggtatgattaggatcccattgaacgaggagagctcaaagggcgccggacagattgaggagttcctcatgcaattcaatggtgaaggcatccagcacgttgctttcctgacagatgaccttgtgaagacctgggatgccctcaagaagattggcatgaggttcatgaccgctccacctgacacttactacgagatgttggagggacgcctccctgatcatggcgagcccgttgaccagctgcaagctagaggaatcctcctggatggttcctctgtggagggcgacaagaggcttttgctccaaattatgagcgagactcttatgggacccgtgttcttcgagttcatccagaggaagggcgatgacggattcggcgagggcaacttcaaggccctgttcgagtctattgagagagatcaggtgaggcgcggcgttcttacagctgactga

SEQ ID NO: 287 - DNA, 1077 bp, Artificial Sequence
  PfHPPDm-F372N Nucleotide Sequence
atggccgatttgtacgagaacccaatgggactcatgggtttcgagttcattgagttcgcttcccccaccccaggtactttggagcctattttcgagatcatgggcttcactaaggttgccacacacaggtctaagaatgtgcatctctaccgccaaggagagattaacctgatccttaacaatgagcctaatagcatcgcctcatacttcgctgctgagcatggtccatctgtttgcggcatggctttcagagtgaaggattcacaaaaggcctacaacagggctttggagctcggcgcccagcccattcatatcgacaccggacctatggagctgaatcttcctgccattaagggcatcggcggagctccattgtacctcattgatcgcttcggcgagggctcctctatctacgatatcgacttcgtgtacctggagggcgttgagagaaaccctgtgggagctggtctgaaggttatcgaccaccttactcataatgtttacagaggaaggatggtgtactgggccaacttctacgagaagctgttcaatttccgcgaggctagatacttcgatattaagggcgagtacacaggacttacctccaaggccatgtctgctcccgacggtatgattaggatcccattgaacgaggagagctcaaagggcgccggacagattgaggagttcctcatgcaattcaatggtgaaggcatccagcacgttgctttcctgacagatgaccttgtgaagacctgggatgccctcaagaagattggcatgaggttcatgaccgctccacctgacacttactacgagatgttggagggacgcctccctgatcatggcgagcccgttgaccagctgcaagctagaggaatcctcctggatggttcctctgtggagggcgacaagaggcttttgctccaaattaacagcgagactcttatgggacccgtgttcttcgagttcatccagaggaagggcgatgacggattcggcgagggcaacttcaaggccctgttcgagtctattgagagagatcaggtgaggcgcggcgttcttacagctgactga

SEQ ID NO: 288 - DNA, 1077 bp, Artificial Sequence
  PfHPPDm-F372Q Nucleotide Sequence
atggccgatttgtacgagaacccaatgggactcatgggtttcgagttcattgagttcgcttcccccaccccaggtactttggagcctattttcgagatcatgggcttcactaaggttgccacacacaggtctaagaatgtgcatctctaccgccaaggagagattaacctgatccttaacaatgagcctaatagcatcgcctcatacttcgctgctgagcatggtccatctgtttgcggcatggctttcagagtgaaggattcacaaaaggcctacaacagggctttggagctcggcgcccagcccattcatatcgacaccggacctatggagctgaatcttcctgccattaagggcatcggcggagctccattgtacctcattgatcgcttcggcgagggctcctctatctacgatatcgacttcgtgtacctggagggcgttgagagaaaccctgtgggagctggtctgaaggttatcgaccaccttactcataatgtttacagaggaaggatggtgtactgggccaacttctacgagaagctgttcaatttccgcgaggctagatacttcgatattaagggcgagtacacaggacttacctccaaggccatgtctgctcccgacggtatgattaggatcccattgaacgaggagagctcaaagggcgccggacagattgaggagttcctcatgcaattcaatggtgaaggcatccagcacgttgctttcctgacagatgaccttgtgaagacctgggatgccctcaagaagattggcatgaggttcatgaccgctccacctgacacttactacgagatgttggagggacgcctccctgatcatggcgagcccgttgaccagctgcaagctagaggaatcctcctggatggttcctctgtggagggcgacaagaggcttttgctccaaattcaaagcgagactcttatgggacccgtgttcttcgagttcatccagaggaagggcgatgacggattcggcgagggcaacttcaaggccctgttcgagtctattgagagagatcaggtgaggcgcggcgttcttacagctgactga

SEQ ID NO: 289 - DNA, 1077 bp, Artificial Sequence
  PfHPPDm-F372D Nucleotide Sequence
atggccgatttgtacgagaacccaatgggactcatgggtttcgagttcattgagttcgcttcccccaccccaggtactttggagcctattttcgagatcatgggcttcactaaggttgccacacacaggtctaagaatgtgcatctctaccgccaaggagagattaacctgatccttaacaatgagcctaatagcatcgcctcatacttcgctgctgagcatggtccatctgtttgcggcatggctttcagagtgaaggattcacaaaaggcctacaacagggctttggagctcggcgcccagcccattcatatcgacaccggacctatggagctgaatcttcctgccattaagggcatcggcggagctccattgtacctcattgatcgcttcggcgagggctcctctatctacgatatcgacttcgtgtacctggagggcgttgagagaaaccctgtgggagctggtctgaaggttatcgaccaccttactcataatgtttacagaggaaggatggtgtactgggccaacttctacgagaagctgttcaatttccgcgaggctagatacttcgatattaagggcgagtacacaggacttacctccaaggccatgtctgctcccgacggtatgattaggatcccattgaacgaggagagctcaaagggcgccggacagattgaggagttcctcatgcaattcaatggtgaaggcatccagcacgttgctttcctgacagatgaccttgtgaagacctgggatgccctcaagaagattggcatgaggttcatgaccgctccacctgacacttactacgagatgttggagggacgcctccctgatcatggcgagcccgttgaccagctgcaagctagaggaatcctcctggatggttcctctgtggagggcgacaagaggcttttgctccaaattgacagcgagactcttatgggacccgtgttcttcgagttcatccagaggaagggcgatgacggattcggcgagggcaacttcaaggccctgttcgagtctattgagagagatcaggtgaggcgcggcgttcttacagctgactga

SEQ ID NO: 290 - DNA, 1077 bp, Artificial Sequence
  PfHPPDm-F372E Nucleotide Sequence
atggccgatttgtacgagaacccaatgggactcatgggtttcgagttcattgagttcgcttcccccaccccaggtactttggagcctattttcgagatcatgggcttcactaaggttgccacacacaggtctaagaatgtgcatctctaccgccaaggagagattaacctgatccttaacaatgagcctaatagcatcgcctcatacttcgctgctgagcatggtccatctgtttgcggcatggctttcagagtgaaggattcacaaaaggcctacaacagggctttggagctcggcgcccagcccattcatatcgacaccggacctatggagctgaatcttcctgccattaagggcatcggcggagctccattgtacctcattgatcgcttcggcgagggctcctctatctacgatatcgacttcgtgtacctggagggcgttgagagaaaccctgtgggagctggtctgaaggttatcgaccaccttactcataatgtttacagaggaaggatggtgtactgggccaacttctacgagaagctgttcaatttccgcgaggctagatacttcgatattaagggcgagtacacaggacttacctccaaggccatgtctgctcccgacggtatgattaggatcccattgaacgaggagagctcaaagggcgccggacagattgaggagttcctcatgcaattcaatggtgaaggcatccagcacgttgctttcctgacagatgaccttgtgaagacctgggatgccctcaagaagattggcatgaggttcatgaccgctccacctgacacttactacgagatgttggagggacgcctccctgatcatggcgagcccgttgaccagctgcaagctagaggaatcctcctggatggttcctctgtggagggcgacaagaggcttttgctccaaattgagagcgagactcttatgggacccgtgttcttcgagttcatccagaggaagggcgatgacggattcggcgagggcaacttcaaggccctgttcgagtctattgagagagatcaggtgaggcgcggcgttcttacagctgactga

SEQ ID NO: 291 - DNA, 1077 bp, Artificial Sequence
  PfHPPDm-F372K Nucleotide Sequence
atggccgatttgtacgagaacccaatgggactcatgggtttcgagttcattgagttcgcttcccccaccccaggtactttggagcctattttcgagatcatgggcttcactaaggttgccacacacaggtctaagaatgtgcatctctaccgccaaggagagattaacctgatccttaacaatgagcctaatagcatcgcctcatacttcgctgctgagcatggtccatctgtttgcggcatggctttcagagtgaaggattcacaaaaggcctacaacagggctttggagctcggcgcccagcccattcatatcgacaccggacctatggagctgaatcttcctgccattaagggcatcggcggagctccattgtacctcattgatcgcttcggcgagggctcctctatctacgatatcgacttcgtgtacctggagggcgttgagagaaaccctgtgggagctggtctgaaggttatcgaccaccttactcataatgtttacagaggaaggatggtgtactgggccaacttctacgagaagctgttcaatttccgcgaggctagatacttcgatattaagggcgagtacacaggacttacctccaaggccatgtctgctcccgacggtatgattaggatcccattgaacgaggagagctcaaagggcgccggacagattgaggagttcctcatgcaattcaatggtgaaggcatccagcacgttgctttcctgacagatgaccttgtgaagacctgggatgccctcaagaagattggcatgaggttcatgaccgctccacctgacacttactacgagatgttggagggacgcctccctgatcatggcgagcccgttgaccagctgcaagctagaggaatcctcctggatggttcctctgtggagggcgacaagaggcttttgctccaaattaagagcgagactcttatgggacccgtgttcttcgagttcatccagaggaagggcgatgacggattcggcgagggcaacttcaaggccctgttcgagtctattgagagagatcaggtgaggcgcggcgttcttacagctgactga

SEQ ID NO: 292 - DNA, 1077 bp, Artificial Sequence
  PfHPPDm-F372R Nucleotide Sequence
atggccgatttgtacgagaacccaatgggactcatgggtttcgagttcattgagttcgcttcccccaccccaggtactttggagcctattttcgagatcatgggcttcactaaggttgccacacacaggtctaagaatgtgcatctctaccgccaaggagagattaacctgatccttaacaatgagcctaatagcatcgcctcatacttcgctgctgagcatggtccatctgtttgcggcatggctttcagagtgaaggattcacaaaaggcctacaacagggctttggagctcggcgcccagcccattcatatcgacaccggacctatggagctgaatcttcctgccattaagggcatcggcggagctccattgtacctcattgatcgcttcggcgagggctcctctatctacgatatcgacttcgtgtacctggagggcgttgagagaaaccctgtgggagctggtctgaaggttatcgaccaccttactcataatgtttacagaggaaggatggtgtactgggccaacttctacgagaagctgttcaatttccgcgaggctagatacttcgatattaagggcgagtacacaggacttacctccaaggccatgtctgctcccgacggtatgattaggatcccattgaacgaggagagctcaaagggcgccggacagattgaggagttcctcatgcaattcaatggtgaaggcatccagcacgttgctttcctgacagatgaccttgtgaagacctgggatgccctcaagaagattggcatgaggttcatgaccgctccacctgacacttactacgagatgttggagggacgcctccctgatcatggcgagcccgttgaccagctgcaagctagaggaatcctcctggatggttcctctgtggagggcgacaagaggcttttgctccaaattcgcagcgagactcttatgggacccgtgttcttcgagttcatccagaggaagggcgatgacggattcggcgagggcaacttcaaggccctgttcgagtctattgagagagatcaggtgaggcgcggcgttcttacagctgactga

SEQ ID NO: 293 - DNA, 1077 bp, Artificial Sequence
  PfHPPDm-F372H Nucleotide Sequence
atggccgatttgtacgagaacccaatgggactcatgggtttcgagttcattgagttcgcttcccccaccccaggtactttggagcctattttcgagatcatgggcttcactaaggttgccacacacaggtctaagaatgtgcatctctaccgccaaggagagattaacctgatccttaacaatgagcctaatagcatcgcctcatacttcgctgctgagcatggtccatctgtttgcggcatggctttcagagtgaaggattcacaaaaggcctacaacagggctttggagctcggcgcccagcccattcatatcgacaccggacctatggagctgaatcttcctgccattaagggcatcggcggagctccattgtacctcattgatcgcttcggcgagggctcctctatctacgatatcgacttcgtgtacctggagggcgttgagagaaaccctgtgggagctggtctgaaggttatcgaccaccttactcataatgtttacagaggaaggatggtgtactgggccaacttctacgagaagctgttcaatttccgcgaggctagatacttcgatattaagggcgagtacacaggacttacctccaaggccatgtctgctcccgacggtatgattaggatcccattgaacgaggagagctcaaagggcgccggacagattgaggagttcctcatgcaattcaatggtgaaggcatccagcacgttgctttcctgacagatgaccttgtgaagacctgggatgccctcaagaagattggcatgaggttcatgaccgctccacctgacacttactacgagatgttggagggacgcctccctgatcatggcgagcccgttgaccagctgcaagctagaggaatcctcctggatggttcctctgtggagggcgacaagaggcttttgctccaaattcacagcgagactcttatgggacccgtgttcttcgagttcatccagaggaagggcgatgacggattcggcgagggcaacttcaaggccctgttcgagtctattgagagagatcaggtgaggcgcggcgttcttacagctgactga

SEQ ID NO: 294 - DNA, 1074 bp, Artificial Sequence
  PfHPPDm-F372 Nucleotide Sequence
atggccgatttgtacgagaacccaatgggactcatgggtttcgagttcattgagttcgcttcccccaccccaggtactttggagcctattttcgagatcatgggcttcactaaggttgccacacacaggtctaagaatgtgcatctctaccgccaaggagagattaacctgatccttaacaatgagcctaatagcatcgcctcatacttcgctgctgagcatggtccatctgtttgcggcatggctttcagagtgaaggattcacaaaaggcctacaacagggctttggagctcggcgcccagcccattcatatcgacaccggacctatggagctgaatcttcctgccattaagggcatcggcggagctccattgtacctcattgatcgcttcggcgagggctcctctatctacgatatcgacttcgtgtacctggagggcgttgagagaaaccctgtgggagctggtctgaaggttatcgaccaccttactcataatgtttacagaggaaggatggtgtactgggccaacttctacgagaagctgttcaatttccgcgaggctagatacttcgatattaagggcgagtacacaggacttacctccaaggccatgtctgctcccgacggtatgattaggatcccattgaacgaggagagctcaaagggcgccggacagattgaggagttcctcatgcaattcaatggtgaaggcatccagcacgttgctttcctgacagatgaccttgtgaagacctgggatgccctcaagaagattggcatgaggttcatgaccgctccacctgacacttactacgagatgttggagggacgcctccctgatcatggcgagcccgttgaccagctgcaagctagaggaatcctcctggatggttcctctgtggagggcgacaagaggcttttgctccaaattagcgagactcttatgggacccgtgttcttcgagttcatccagaggaagggcgatgacggattcggcgagggcaacttcaaggccctgttcgagtctattgagagagatcaggtgaggcgcggcgttcttacagctgactga

SEQ ID NO: 295 - protein, 444 aa, Artificial Sequence
  ZmHPPDm-F372G Amino Acid Sequence
MPPTPTAAAAGAAVAAASAAEQAAFRLVGHRNFVRFNPRSDRFHTLAFHHVELWCADAASAAGRFSFGLGAPLAARSDLSTGNSAHASLLLRSGSLSFLFTAPYAHGADAATAALPSFSAAAARRFAADHGLAVRAVALRVADAEEAFRTSVAAGARPAFGPVDLGRGFRLAEVELYGDVVLRYVSYPDGAAGEPFLPGFEGVASPGAADYGLSRFDHIVGNVPELAPAAAYFAGFTGFHEFAEFTTEDVGTAESGLNSMVLANNSENVLLPLNEPVHGTKRRSQIQTFLDHHGGPGVQHMALASDDVLRTLREMQARSAMGGFEFMAPPTSDYYDGVRRRAGDVLTEAQIKECQELGVLVDRDDQGVLLQIGPKPVGDRPTLFLEIIQRIGCMERDEKGQEYQKGGCGGFGKGNFSQLFKSIEDYEKSLEAMQAAAAATAQGS

SEQ ID NO: 296 - DNA, 1335 bp, Artificial Sequence
  ZmHPPDm-F372G Nucleotide Sequence
atgcctcctactcctactgctgctgctgctggagctgctgttgctgctgcttctgctgctgaacaagctgcttttagattggttggacatagaaattttgttagatttaatcctagatctgatagatttcatactttggcttttcatcatgttgaattgtggtgtgctgatgctgcttctgctgctggaagattttcttttggattgggagctcctttggctgctagatctgatttgtctactggaaattctgctcatgcttctttgttgttgagatctggatctttgtcttttttgtttactgctccttatgctcatggagctgatgctgctactgctgctttgccttctttttctgctgctgctgctagaagatttgctgctgatcatggattggctgttagagctgttgctttgagagttgctgatgctgaagaagcttttagaacttctgttgctgctggagctagacctgcttttggacctgttgatttgggaagaggatttagattggctgaagttgaattgtatggagatgttgttttgagatatgtttcttatcctgatggagctgctggagaaccttttttgcctggatttgaaggagttgcttctcctggagctgctgattatggattgtctagatttgatcatattgttggaaatgttcctgaattggctcctgctgctgcttattttgctggatttactggatttcatgaatttgctgaatttactactgaagatgttggaactgctgaatctggattgaattctatggttttggctaataattctgaaaatgttttgttgcctttgaatgaacctgttcatggaactaagagaagatctcaaattcaaacttttttggatcatcatggaggacctggagttcaacatatggctttggcttctgatgatgttttgagaactttgagagaaatgcaagctagatctgctatgggaggatttgaatttatggctcctcctacttctgattattatgatggagttagaagaagagctggagatgttttgactgaagctcaaattaaggaatgtcaagaattgggagttttggttgatagagatgatcaaggagttttgttgcaaattggacctaagcctgttggagatagacctactttgtttttggaaattattcaaagaattggatgtatggaaagagatgaaaagggacaagaatatcaaaagggaggatgtggaggatttggaaagggaaatttttctcaattgtttaagtctattgaagattatgaaaagtctttggaagctatgcaagctgctgctgctgctactgctcaaggatcttga

SEQ ID NO: 297 - protein, 445 aa, Artificial Sequence
  AtHPPDm-F372G Amino Acid Sequence
MGHQNAAVSENQNHDDGAASSPGFKLVGFSKFVRKNPKSDKFKVKRFHHIEFWCGDATNVARRFSWGLGMRFSAKSDLSTGNMVHASYLLTSGDLRFLFTAPYSPSLSAGEIKPTTTASIPSFDHGSCRSFFSSHGLGVRAVAIEVEDAESAFSISVANGAIPSSPPIVLNEAVTIAEVKLYGDVVLRYVSYKAEDTEKSEFLPGFERVEDASSFPLDYGIRRLDHAVGNVPELGPALTYVAGFTGFHQFAEFTADDVGTAESGLNSAVLASNDEMVLLPINEPVHGTKRKSQIQTYLEHNEGAGLQHLALMSEDIFRTLREMRKRSSIGGFDFMPSPPPTYYQNLKKRVGDVLSDDQIKECEELGILVDRDDQGTLLQIGTKPLGDRPTIFIEIIQRVGCMMKDEEGKAYQSGGCGGFGKGNFSELFKSIEEYEKTLEAKQLVG

SEQ ID NO: 298 - DNA, 1338 bp, Artificial Sequence
  AtHPPDm-F372G Nucleotide Sequence
atgggccaccaaaacgccgccgtttcagagaatcaaaaccatgatgacggcgctgcgtcgtcgccgggattcaagctcgtcggattttccaagttcgtaagaaagaatccaaagtctgataaattcaaggttaagcgcttccatcacatcgagttctggtgcggcgacgcaaccaacgtcgctcgtcgcttctcctggggtctggggatgagattctccgccaaatccgatctttccaccggaaacatggttcacgcctcttacctactcacctccggtgacctccgattccttttcactgctccttactctccgtctctctccgccggagagattaaaccgacaaccacagcttctatcccaagtttcgatcacggctcttgtcgttccttcttctcttcacatggtctcggtgttagagccgttgcgattgaagtagaagacgcagagtcagctttctccatcagtgtagctaatggcgctattccttcgtcgcctcctatcgtcctcaatgaagcagttacgatcgctgaggttaaactatacggcgatgttgttctccgatatgttagttacaaagcagaagataccgaaaaatccgaattcttgccagggttcgagcgtgtagaggatgcgtcgtcgttcccattggattatggtatccggcggcttgaccacgccgtgggaaacgttcctgagcttggtccggctttaacttatgtagcggggttcactggttttcaccaattcgcagagttcacagcagacgacgttggaaccgccgagagcggtttaaattcagcggtcctggctagcaatgatgaaatggttcttctaccgattaacgagccagtgcacggaacaaagaggaagagtcagattcagacgtatttggaacataacgaaggcgcagggctacaacatctggctctgatgagtgaagacatattcaggaccctgagagagatgaggaagaggagcagtattggaggattcgacttcatgccttctcctccgcctacttactaccagaatctcaagaaacgggtcggcgacgtgctcagcgatgatcagatcaaggagtgtgaggaattagggattcttgtagacagagatgatcaagggacgttgcttcaaatcggcacaaaaccactaggtgacaggccgacgatatttatagagataatccagagagtaggatgcatgatgaaagatgaggaagggaaggcttaccagagtggaggatgtggtggttttggcaaaggcaatttctctgagctcttcaagtccattgaagaatacgaaaagactcttgaagccaaacagttagtgggatga

SEQ ID NO: 299 - protein, 436 aa, Artificial Sequence
  GsHPPDm-F372G Amino Acid Sequence
MVQTNQSGSGNDFKLVGFSNFVRSNPKSDRFTVKRFHHIEFWCTDATNVARRFSWGLGMQFVAKSDLSTGNLTHASYLLRSRDLNFLFTAPYSPSIAVAQNLSPQSTASIPSFDHSLCRSFAATHGLGVRAIAIEVDDAETAFTTSVTHGALPFCPPTPLGDVATIAEVKLYGDVVLRYVSYTTTINSDHDFLPGFEKIEDTLSYPLDYGLRRLDHAVGNVPELGPAVSYVKSFTGFHEFAEFTAEDVGTSESGLNSVVLANNEEMVLLPMNEPVFGTKRKSQIQTYLEHNEGAGVQHLALVSEDIFKTLREMRKRSFVGGFEFMPSPPPTYYKKLKQRAGDILSDEQIKECEELGILVDRDDQGTLLQIGTKPVGDRPTIFIEIIQRIGCMVKDEEGKQYQKGGCGGFGKGNFSELFKSIEEYEKSLEAKQSQNP

SEQ ID NO: 300 - DNA, 1311 bp, Artificial Sequence
  GsHPPDm-F372G Nucleotide Sequence
atggttcaaactaatcaatctggatctggaaatgattttaagttggttggattttctaattttgttagatctaatcctaagtctgatagatttactgttaagagatttcatcatattgaattttggtgtactgatgctactaatgttgctagaagattttcttggggattgggaatgcaatttgttgctaagtctgatttgtctactggaaatttgactcatgcttcttatttgttgagatctagagatttgaattttttgtttactgctccttattctccttctattgctgttgctcaaaatttgtctcctcaatctactgcttctattccttcttttgatcattctttgtgtagatcttttgctgctactcatggattgggagttagagctattgctattgaagttgatgatgctgaaactgcttttactacttctgttactcatggagctttgcctttttgtcctcctactcctttgggagatgttgctactattgctgaagttaagttgtatggagatgttgttttgagatatgtttcttatactactactattaattctgatcatgattttttgcctggatttgaaaagattgaagatactttgtcttatcctttggattatggattgagaagattggatcatgctgttggaaatgttcctgaattgggacctgctgtttcttatgttaagtcttttactggatttcatgaatttgctgaatttactgctgaagatgttggaacttctgaatctggattgaattctgttgttttggctaataatgaagaaatggttttgttgcctatgaatgaacctgtttttggaactaagagaaagtctcaaattcaaacttatttggaacataatgaaggagctggagttcaacatttggctttggtttctgaagatatttttaagactttgagagaaatgagaaagagatcttttgttggaggatttgaatttatgccttctcctcctcctacttattataagaagttgaagcaaagagctggagatattttgtctgatgaacaaattaaggaatgtgaagaattgggaattttggttgatagagatgatcaaggaactttgttgcaaattggaactaagcctgttggagatagacctactatttttattgaaattattcaaagaattggatgtatggttaaggatgaagaaggaaagcaatatcaaaagggaggatgtggaggatttggaaagggaaatttttctgaattgtttaagtctattgaagaatatgaaaagtctttggaagctaagcaatctcaaaatccttga

SEQ ID NO: 301 - protein, 436 aa, Artificial Sequence
  TaHPPDm-F372G Amino Acid Sequence
MPPTPTTPAATGAGAAAAVTPEHARPRRMVRFNPRSDRFHTLSFHHVEFWCADAASAAGRFAFALGAPLAARSDLSTGNSVHASQLLRSGNLAFLFTAPYANGCDAATASLPSFSADAARRFSADHGLAVRSIALRVADAAEAFRASVDGGARPAFSPVDLGRGFGFAEVELYGDVVLRFVSHPDGTDVPFLPGFEGVSNPGAVDYGLTRFDHVVGNVPELASAAAYVAGFTGFHEFAEFTTEDVGTAESGLNSMVLANNSEGVLLPLNEPVHGTKRRSQIQTFLEHHGGPGVQHIAVASSDVLRTLREMRARSAMGGFDFLPPPLPKYYEGVRRIAGDVLSEAQIKECQELGVLVDRDDQGVLLQIGTKPVGDRPTLFLEMIQRIGCMEKDERGEEYQKGGCGGFGKGNFSELFKSIEDYEKSLEAKQSAAVQGS

SEQ ID NO: 302 - DNA, 1311 bp, Artificial Sequence
  TaHPPDm-F372G Nucleotide Sequence
atgcctcctactcctactactcctgctgctactggagctggagctgctgctgctgttactcctgaacatgctagacctagaagaatggttagatttaatcctagatctgatagatttcatactttgtcttttcatcatgttgaattttggtgtgctgatgctgcttctgctgctggaagatttgcttttgctttgggagctcctttggctgctagatctgatttgtctactggaaattctgttcatgcttctcaattgttgagatctggaaatttggcttttttgtttactgctccttatgctaatggatgtgatgctgctactgcttctttgccttctttttctgctgatgctgctagaagattttctgctgatcatggattggctgttagatctattgctttgagagttgctgatgctgctgaagcttttagagcttctgttgatggaggagctagacctgctttttctcctgttgatttgggaagaggatttggatttgctgaagttgaattgtatggagatgttgttttgagatttgtttctcatcctgatggaactgatgttccttttttgcctggatttgaaggagtttctaatcctggagctgttgattatggattgactagatttgatcatgttgttggaaatgttcctgaattggcttctgctgctgcttatgttgctggatttactggatttcatgaatttgctgaatttactactgaagatgttggaactgctgaatctggattgaattctatggttttggctaataattctgaaggagttttgttgcctttgaatgaacctgttcatggaactaagagaagatctcaaattcaaacttttttggaacatcatggaggacctggagttcaacatattgctgttgcttcttctgatgttttgagaactttgagagaaatgagagctagatctgctatgggaggatttgattttttgcctcctcctttgcctaagtattatgaaggagttagaagaattgctggagatgttttgtctgaagctcaaattaaggaatgtcaagaattgggagttttggttgatagagatgatcaaggagttttgttgcaaattggaactaagcctgttggagatagacctactttgtttttggaaatgattcaaagaattggatgtatggaaaaggatgaaagaggagaagaatatcaaaagggaggatgtggaggatttggaaagggaaatttttctgaattgtttaagtctattgaagattatgaaaagtctttggaagctaagcaatctgctgctgttcaaggatcttga

SEQ ID NO: 303 - protein, 436 aa, Artificial Sequence
  BdHPPDm-F372G Amino Acid Sequence
MPPPATTAAPAAAAVTPEHARPPRRVARVNPRSDRFSALSFHHVELWCADAASAAGRFSFALGAPPAARSDLSTGNSAHASILLRSGSLAFLFTAPYAPSPASDSAASIPSFSASAARQFTADHGGLAVRAVALRVSSASDAFHASVSAGARPSFPPADLGQGFALAEVELYGDVVLRFISHPDENTEIPFLPGFESVSNPGASTYGLTRFDHVVGNVPSLAPVAAYIAGFTGFHEFAEFTAEDVGTADSGLNSVVLANNSERVLLPLNEPVHGTKRRSQIQTYLDHHGGPGVQHIALASDDVLRTLREMRARSAMGGFEFLAPPPPNYYDGVRRRAGDVLSEAQIKECQELGVLVDRDDQGVLLQIGTKPVGDRPTLFLEMIQRIGCMEKDEIGQEQQKGGCGGFGKGNFSELFRSIEEYEKSLEAKQSAVVQES

SEQ ID NO: 304 - DNA, 1311 bp, Artificial Sequence
  BdHPPDm-F372G Nucleotide Sequence
atgcctcctcctgctactactgctgctcctgctgctgctgctgttactcctgaacatgctagacctcctagaagagttgctagagttaatcctagatctgatagattttctgctttgtcttttcatcatgttgaattgtggtgtgctgatgctgcttctgctgctggaagattttcttttgctttgggagctcctcctgctgctagatctgatttgtctactggaaattctgctcatgcttctattttgttgagatctggatctttggcttttttgtttactgctccttatgctccttctcctgcttctgattctgctgcttctattccttctttttctgcttctgctgctagacaatttactgctgatcatggaggattggctgttagagctgttgctttgagagtttcttctgcttctgatgcttttcatgcttctgtttctgctggagctagaccttcttttcctcctgctgatttgggacaaggatttgctttggctgaagttgaattgtatggagatgttgttttgagatttatttctcatcctgatgaaaatactgaaattccttttttgcctggatttgaatctgtttctaatcctggagcttctacttatggattgactagatttgatcatgttgttggaaatgttccttctttggctcctgttgctgcttatattgctggatttactggatttcatgaatttgctgaatttactgctgaagatgttggaactgctgattctggattgaattctgttgttttggctaataattctgaaagagttttgttgcctttgaatgaacctgttcatggaactaagagaagatctcaaattcaaacttatttggatcatcatggaggacctggagttcaacatattgctttggcttctgatgatgttttgagaactttgagagaaatgagagctagatctgctatgggaggatttgaatttttggctcctcctcctcctaattattatgatggagttagaagaagagctggagatgttttgtctgaagctcaaattaaggaatgtcaagaattgggagttttggttgatagagatgatcaaggagttttgttgcaaattggaactaagcctgttggagatagacctactttgtttttggaaatgattcaaagaattggatgtatggaaaaggatgaaattggacaagaacaacaaaagggaggatgtggaggatttggaaagggaaatttttctgaattgtttagatctattgaagaatatgaaaagtctttggaagctaagcaatctgctgttgttcaagaatcttga

SEQ ID NO: 305 - protein, 434 aa, Artificial Sequence
  HvHPPDm-F372G Amino Acid Sequence
MPPTPTTPAATGAAAAVTPEHARPHRMVRFNPRSDRFHTLSFHHVEFWCADAASAAGRFAFALGAPLAARSDLSTGNSAHASQLLRSGSLAFLFTAPYANGCDAATASLPSFSADAARRFSADHGIAVRSVALRVADAAEAFRASRRRGARPAFAPVDLGRGFAFAEVELYGDVVLRFVSHPDGTDVPFLPGFEGVTNPDAVDYGLTRFDHVVGNVPELAPAAAYIAGFTGFHEFAEFTAEDVGTTESGLNSVVLANNSEGVLLPLNEPVHGTKRRSQIQTFLEHHGGPGVQHIAVASSDVLRTLRKMRARSAMGGFDFLPPPLPKYYEGVRRLAGDVLSEAQIKECQELGVLVDRDDQGVLLQIGTKPVGDRPTLFLEMIQRIGCMEKDERGEEYQKGGCGGFGKGNFSELFKSIEDYEKSLEAKQSAAVQGS

SEQ ID NO: 306 - DNA, 1305 bp, Artificial Sequence
  HvHPPDm-F372G Nucleotide Sequence
atgcctcctactcctactactcctgctgctactggagctgctgctgctgttactcctgaacatgctagacctcatagaatggttagatttaatcctagatctgatagatttcatactttgtcttttcatcatgttgaattttggtgtgctgatgctgcttctgctgctggaagatttgcttttgctttgggagctcctttggctgctagatctgatttgtctactggaaattctgctcatgcttctcaattgttgagatctggatctttggcttttttgtttactgctccttatgctaatggatgtgatgctgctactgcttctttgccttctttttctgctgatgctgctagaagattttctgctgatcatggaattgctgttagatctgttgctttgagagttgctgatgctgctgaagcttttagagcttctagaagaagaggagctagacctgcttttgctcctgttgatttgggaagaggatttgcttttgctgaagttgaattgtatggagatgttgttttgagatttgtttctcatcctgatggaactgatgttccttttttgcctggatttgaaggagttactaatcctgatgctgttgattatggattgactagatttgatcatgttgttggaaatgttcctgaattggctcctgctgctgcttatattgctggatttactggatttcatgaatttgctgaatttactgctgaagatgttggaactactgaatctggattgaattctgttgttttggctaataattctgaaggagttttgttgcctttgaatgaacctgttcatggaactaagagaagatctcaaattcaaacttttttggaacatcatggaggacctggagttcaacatattgctgttgcttcttctgatgttttgagaactttgagaaagatgagagctagatctgctatgggaggatttgattttttgcctcctcctttgcctaagtattatgaaggagttagaagattggctggagatgttttgtctgaagctcaaattaaggaatgtcaagaattgggagttttggttgatagagatgatcaaggagttttgttgcaaattggaactaagcctgttggagatagacctactttgtttttggaaatgattcaaagaattggatgtatggaaaaggatgaaagaggagaagaatatcaaaagggaggatgtggaggatttggaaagggaaatttttctgaattgtttaagtctattgaagattatgaaaagtctttggaagctaagcaatctgctgctgttcaaggatcttga

SEQ ID NO: 307 - protein, 441 aa, Artificial Sequence
  SiHPPDm-F372G Amino Acid Sequence
MPPTPTPAAAAPGAAAAPAAGDQAAFRLVGHRGFVRVNPRSDRFHTLSFHHVELWCADATSAAGRFSFGLGAPLAARSDLSTGNSAHASLLLRSGSLAFLFTAPYAHGVDAATASLPSFSAPAARSFAADHGLAVRAIGLRVADAEDAFRASVAAGARPAFKPVELGLGFRLAEVELYGDVVLRYVSYPDAEDAPFLPGFENVNNPGALNYGLRRFDHIVGNVPELAPVAAYVAGFTGFHEFAEFTAEDVGTAESGLNSMVLANNSETVLIPLNEPVHGTKRRSQIQTFLDHNGGPGVQHIALASDDVLRTLREMQARSAMGGFEFMAAPPPDYYEGVRRRAGDVLSEAQIKECQELGVLVDRDDQGVLLQIGTKPVGDRQTLFLEIIQRIGCMEKDEQGQEYQKGGCGGFGKGNFSQLFKSIEDYEKSLESKQAAAVQGS

SEQ ID NO: 308 - DNA, 1326 bp, Artificial Sequence
  SiHPPDm-F372G Nucleotide Sequence
atgcctcctactcctactcctgctgctgctgctcctggagctgctgctgctcctgctgctggagatcaagctgcttttagattggttggacatagaggatttgttagagttaatcctagatctgatagatttcatactttgtcttttcatcatgttgaattgtggtgtgctgatgctacttctgctgctggaagattttcttttggattgggagctcctttggctgctagatctgatttgtctactggaaattctgctcatgcttctttgttgttgagatctggatctttggcttttttgtttactgctccttatgctcatggagttgatgctgctactgcttctttgccttctttttctgctcctgctgctagatcttttgctgctgatcatggattggctgttagagctattggattgagagttgctgatgctgaagatgcttttagagcttctgttgctgctggagctagacctgcttttaagcctgttgaattgggattgggatttagattggctgaagttgaattgtatggagatgttgttttgagatatgtttcttatcctgatgctgaagatgctccttttttgcctggatttgaaaatgttaataatcctggagctttgaattatggattgagaagatttgatcatattgttggaaatgttcctgaattggctcctgttgctgcttatgttgctggatttactggatttcatgaatttgctgaatttactgctgaagatgttggaactgctgaatctggattgaattctatggttttggctaataattctgaaactgttttgattcctttgaatgaacctgttcatggaactaagagaagatctcaaattcaaacttttttggatcataatggaggacctggagttcaacatattgctttggcttctgatgatgttttgagaactttgagagaaatgcaagctagatctgctatgggaggatttgaatttatggctgctcctcctcctgattattatgaaggagttagaagaagagctggagatgttttgtctgaagctcaaattaaggaatgtcaagaattgggagttttggttgatagagatgatcaaggagttttgttgcaaattggaactaagcctgttggagatagacaaactttgtttttggaaattattcaaagaattggatgtatggaaaaggatgaacaaggacaagaatatcaaaagggaggatgtggaggatttggaaagggaaatttttctcaattgtttaagtctattgaagattatgaaaagtctttggaatctaagcaagctgctgctgttcaaggatcttga

SEQ ID NO: 309 - protein, 440 aa, Artificial Sequence
  SbHPPDm-F372G Amino Acid Sequence
MPPTPTTAAATGAAVAAASAEQAAFRLVGHRNFVRVNPRSDRFHTLAFHHVELWCADAASAAGRFSFGLGAPLAARSDLSTGNTAHASLLLRSGALAFLFTAPYAHGADAATASLPSFSAAEARRFAADHGLAVRAVALRVADAEDAFRASVAAGARPAFEPVELGLGFRLAEVELYGDVVLRYVSYPDDADASFLPGFVGVTSPGAADYGLRRFDHIVGNVPELAPAAAYFAGFTGFHEFAEFTAEDVGTTESGLNSMVLANNAENVLLPLNEPVHGTKRRSQIQTYLDHHGGPGVQHMALASDDVLRTLREMQARSAMGGFEFMAPPAPEYYDGVRRRAGDVLTEAQIKECQELGVLVDRDDQGVLLQIGTKPVGDRPTLFLEIIQRIGCMEKDEKGQEYQKGGCGGFGKGNFSQLFKSIEDYEKSLEAKQAAAAQGS

SEQ ID NO: 310 - DNA, 1323 bp, Artificial Sequence
  SbHPPDm-F372G Nucleotide Sequence
atgcctcctactcctactactgctgctgctactggagctgctgttgctgctgcttctgctgaacaagctgcttttagattggttggacatagaaattttgttagagttaatcctagatctgatagatttcatactttggcttttcatcatgttgaattgtggtgtgctgatgctgcttctgctgctggaagattttcttttggattgggagctcctttggctgctagatctgatttgtctactggaaatactgctcatgcttctttgttgttgagatctggagctttggcttttttgtttactgctccttatgctcatggagctgatgctgctactgcttctttgccttctttttctgctgctgaagctagaagatttgctgctgatcatggattggctgttagagctgttgctttgagagttgctgatgctgaagatgcttttagagcttctgttgctgctggagctagacctgcttttgaacctgttgaattgggattgggatttagattggctgaagttgaattgtatggagatgttgttttgagatatgtttcttatcctgatgatgctgatgcttcttttttgcctggatttgttggagttacttctcctggagctgctgattatggattgagaagatttgatcatattgttggaaatgttcctgaattggctcctgctgctgcttattttgctggatttactggatttcatgaatttgctgaatttactgctgaagatgttggaactactgaatctggattgaattctatggttttggctaataatgctgaaaatgttttgttgcctttgaatgaacctgttcatggaactaagagaagatctcaaattcaaacttatttggatcatcatggaggacctggagttcaacatatggctttggcttctgatgatgttttgagaactttgagagaaatgcaagctagatctgctatgggaggatttgaatttatggctcctcctgctcctgaatattatgatggagttagaagaagagctggagatgttttgactgaagctcaaattaaggaatgtcaagaattgggagttttggttgatagagatgatcaaggagttttgttgcaaattggaactaagcctgttggagatagacctactttgtttttggaaattattcaaagaattggatgtatggaaaaggatgaaaagggacaagaatatcaaaagggaggatgtggaggatttggaaagggaaatttttctcaattgtttaagtctattgaagattatgaaaagtctttggaagctaagcaagctgctgctgctcaaggatcttga

SEQ ID NO: 311 - protein, 446 aa, Artificial Sequence
  OsHPPDm-F372G Amino Acid Sequence
MPPTPTPTATTGAVSAAAAAGENAGFRLVGHRRFVRANPRSDRFQALAFHHVELWCADAASAAGRFAFALGAPLAARSDLSTGNSAHASLLLRSASVAFLFTAPYGGDHGVGADAATTASIPSFSPGAARRFAADHGLAVHAVALRVADAADAFRASVAAGARPAFQPADLGGGFGLAEVELYGDVVLRFVSHPDGADAPFLPGFEGVSNPGAVDYGLRRFDHVVGNVPELAPVAAYISGFTGFHEFAEFTAEDVGTAESGLNSVVLANNAETVLLPLNEPVHGTKRRSQIQTYLDHHGGPGVQHIALASDDVLGTLREMRARSAMGGFEFLAPPPPNYYDGVRRRAGDVLSEEQINECQELGVLVDRDDQGVLLQIGTKPVGDRPTFFLEMIQRIGCMEKDESGQEYQKGGCGGFGKGNFSELFKSIEEYEKSLEAKQAPTVQGS

SEQ ID NO: 312 - DNA, 1341 bp, Artificial Sequence
  OsHPPDm-F372G Nucleotide Sequence
atgcctcctactcctactcctactgctactactggagctgtttctgctgctgctgctgctggagaaaatgctggatttagattggttggacatagaagatttgttagagctaatcctagatctgatagatttcaagctttggcttttcatcatgttgaattgtggtgtgctgatgctgcttctgctgctggaagatttgcttttgctttgggagctcctttggctgctagatctgatttgtctactggaaattctgctcatgcttctttgttgttgagatctgcttctgttgcttttttgtttactgctccttatggaggagatcatggagttggagctgatgctgctactactgcttctattccttctttttctcctggagctgctagaagatttgctgctgatcatggattggctgttcatgctgttgctttgagagttgctgatgctgctgatgcttttagagcttctgttgctgctggagctagacctgcttttcaacctgctgatttgggaggaggatttggattggctgaagttgaattgtatggagatgttgttttgagatttgtttctcatcctgatggagctgatgctccttttttgcctggatttgaaggagtttctaatcctggagctgttgattatggattgagaagatttgatcatgttgttggaaatgttcctgaattggctcctgttgctgcttatatttctggatttactggatttcatgaatttgctgaatttactgctgaagatgttggaactgctgaatctggattgaattctgttgttttggctaataatgctgaaactgttttgttgcctttgaatgaacctgttcatggaactaagagaagatctcaaattcaaacttatttggatcatcatggaggacctggagttcaacatattgctttggcttctgatgatgttttgggaactttgagagaaatgagagctagatctgctatgggaggatttgaatttttggctcctcctcctcctaattattatgatggagttagaagaagagctggagatgttttgtctgaagaacaaattaatgaatgtcaagaattgggagttttggttgatagagatgatcaaggagttttgttgcaaattggaactaagcctgttggagatagacctactttttttttggaaatgattcaaagaattggatgtatggaaaaggatgaatctggacaagaatatcaaaagggaggatgtggaggatttggaaagggaaatttttctgaattgtttaagtctattgaagaatatgaaaagtctttggaagctaagcaagctcctactgttcaaggatcttga

SEQ ID NO: 313 - protein, 488 aa, Artificial Sequence
  GmHPPDm-F372G Amino Acid Sequence
MPMYTPSLSAPSSNHIQPSVTLPLYITTTKLNLKQQHHTTPMPIPMCNEIQAQAQAQAQPGFKLVGFKNFVRTNPKSDRFQVNRFHHIEFWCTDATNASRRFSWGLGMPIVAKSDLSTGNQIHASYLLRSGDLSFLFSAPYSPSLSAGSSAASSASIPSFDAATCLAFAAKHGFGVRAIALEVADAEAAFSASVAKGAEPASPPVLVDDRTGFAEVRLYGDVVLRYVSYKDAAPQAPHADPSRWFLPGFEAAASSSSFPELDYGIRRLDHAVGNVPELAPAVRYLKGFSGFHEFAEFTAEDVGTSESGLNSVVLANNSETVLLPLNEPVYGTKRKSQIETYLEHNEGAGVQHLALVTHDIFTTLREMRKRSFLGGFEFMPSPPPTYYANLHNRAADVLTVDQIKQCEELGILVDRDDQGTLLQIGTKPVGDRPTIFIEIIQRIGCMVEDEEGKVYQKGACGGFGKGNFSELFKSIEEYEKTLEAKRTA

SEQ ID NO: 314 - DNA, 1467 bp, Artificial Sequence
  GmHPPDm-F372G Nucleotide Sequence
atgcctatgtatactccttctttgtctgctccttcttctaatcatattcaaccttctgttactttgcctttgtatattactactactaagttgaatttgaagcaacaacatcatactactcctatgcctattcctatgtgtaatgaaattcaagctcaagctcaagctcaagctcaacctggatttaagttggttggatttaagaattttgttagaactaatcctaagtctgatagatttcaagttaatagatttcatcatattgaattttggtgtactgatgctactaatgcttctagaagattttcttggggattgggaatgcctattgttgctaagtctgatttgtctactggaaatcaaattcatgcttcttatttgttgagatctggagatttgtcttttttgttttctgctccttattctccttctttgtctgctggatcttctgctgcttcttctgcttctattccttcttttgatgctgctacttgtttggcttttgctgctaagcatggatttggagttagagctattgctttggaagttgctgatgctgaagctgctttttctgcttctgttgctaagggagctgaacctgcttctcctcctgttttggttgatgatagaactggatttgctgaagttagattgtatggagatgttgttttgagatatgtttcttataaggatgctgctcctcaagctcctcatgctgatccttctagatggtttttgcctggatttgaagctgctgcttcttcttcttcttttcctgaattggattatggaattagaagattggatcatgctgttggaaatgttcctgaattggctcctgctgttagatatttgaagggattttctggatttcatgaatttgctgaatttactgctgaagatgttggaacttctgaatctggattgaattctgttgttttggctaataattctgaaactgttttgttgcctttgaatgaacctgtttatggaactaagagaaagtctcaaattgaaacttatttggaacataatgaaggagctggagttcaacatttggctttggttactcatgatatttttactactttgagagaaatgagaaagagatcttttttgggaggatttgaatttatgccttctcctcctcctacttattatgctaatttgcataatagagctgctgatgttttgactgttgatcaaattaagcaatgtgaagaattgggaattttggttgatagagatgatcaaggaactttgttgcaaattggaactaagcctgttggagatagacctactatttttattgaaattattcaaagaattggatgtatggttgaagatgaagaaggaaaggtttatcaaaagggagcttgtggaggatttggaaagggaaatttttctgaattgtttaagtctattgaagaatatgaaaagactttggaagctaagagaactgcttga

SEQ ID NO: 315 - protein, 434 aa, Artificial Sequence
  CaHPPDm-F372G Amino Acid Sequence
MGTIETQTGFKLVGFNNFVRTNPKSDRFKVKRFHHVEFWCPDATNTARRFSWGLGMPIVAKSDLSTGNQTHASYLLRSGDLNFLFTAAYSPSISLSAPHPTASIPSFSAPTSFAFSASHGLGVRAVAIEVDDAEFAYTTSVNHGAIPSSPPVVLDNRVKLAEVQLYGDVVLRYVSYNDPIETSNPNPNHWFLPGFEPVEETSSNQSIDFGIQRLDHAVGNVPELSSALNYVKQFTGFHEFAEFTAEDVGTSESGLNSTVLANNEETVLLPMNEPVYGTKRKSQIQTYLEHNEGAGLQHLALMSNDIFKTLREMRKRSGIGGFEFMPSPPPTYYSNLKKRVGDVLNDEQIKECEELGILVDKDDQGTLLQIGTKPVGDRPTIFIEIIQRVGCMLKDDEGKEYQKGGCGGFGKGNFSELFKSIEEYEKTLEIKRTA

SEQ ID NO: 316 - DNA, 1305 bp, Artificial Sequence
  CaHPPDm-F372G Nucleotide Sequence
atgggaactattgaaactcaaactggatttaagttggttggatttaataattttgttagaactaatcctaagtctgatagatttaaggttaagagatttcatcatgttgaattttggtgtcctgatgctactaatactgctagaagattttcttggggattgggaatgcctattgttgctaagtctgatttgtctactggaaatcaaactcatgcttcttatttgttgagatctggagatttgaattttttgtttactgctgcttattctccttctatttctttgtctgctcctcatcctactgcttctattccttctttttctgctcctacttcttttgctttttctgcttctcatggattgggagttagagctgttgctattgaagttgatgatgctgaatttgcttatactacttctgttaatcatggagctattccttcttctcctcctgttgttttggataatagagttaagttggctgaagttcaattgtatggagatgttgttttgagatatgtttcttataatgatcctattgaaacttctaatcctaatcctaatcattggtttttgcctggatttgaacctgttgaagaaacttcttctaatcaatctattgattttggaattcaaagattggatcatgctgttggaaatgttcctgaattgtcttctgctttgaattatgttaagcaatttactggatttcatgaatttgctgaatttactgctgaagatgttggaacttctgaatctggattgaattctactgttttggctaataatgaagaaactgttttgttgcctatgaatgaacctgtttatggaactaagagaaagtctcaaattcaaacttatttggaacataatgaaggagctggattgcaacatttggctttgatgtctaatgatatttttaagactttgagagaaatgagaaagagatctggaattggaggatttgaatttatgccttctcctcctcctacttattattctaatttgaagaagagagttggagatgttttgaatgatgaacaaattaaggaatgtgaagaattgggaattttggttgataaggatgatcaaggaactttgttgcaaattggaactaagcctgttggagatagacctactatttttattgaaattattcaaagagttggatgtatgttgaaggatgatgaaggaaaggaatatcaaaagggaggatgtggaggatttggaaagggaaatttttctgaattgtttaagtctattgaagaatatgaaaagactttggaaattaagagaactgcttga

SEQ ID NO: 317 - protein, 440 aa, Artificial Sequence
  BnHPPDm-F372G Amino Acid Sequence
MGHENAAVCETQQHDDAASPGFKLVGFSKFVRKNPKSDKFKVKRFHHIEFWCGDATNVSRRFSWGLGMRFSAKSDLSTGNMVHASYLLTSGDLRFLFTAPYSPSLSAGEAQPSATASIPSFDHASCRSFFSSHGLGVRAVAIEVEDAESAFSISVANGAVPSSPPNVLNGAVTIAEVKLYGDVVLRYVSYYNGTVSFLPGFESVDDTSSFPLDYGIRRLDHAVGNVPELGPALTYLAGFTGFHQFAEFTADDVGTAESGLNSAVLANNDEMVLLPINEPVHGTKRKSQIQTFLEHNEGAGLQHLALMSEDIFRTLREMRKRSGVGGFDFMPSPPPTYYKNLKKRVGDVLSEEQIEECEELGILVDRDDQGTLLQIGTKPLGDRPTIFIEIIQRVGCMKRDEEGKVYQSGGCGGFGKGNFSELFKSIEEYEKTLEAKQLVG

SEQ ID NO: 318 - DNA, 1323 bp, Artificial Sequence
  BnHPPDm-F372G Nucleotide Sequence
atgggacatgaaaatgctgctgtttgtgaaactcaacaacatgatgatgctgcttctcctggatttaagttggttggattttctaagtttgttagaaagaatcctaagtctgataagtttaaggttaagagatttcatcatattgaattttggtgtggagatgctactaatgtttctagaagattttcttggggattgggaatgagattttctgctaagtctgatttgtctactggaaatatggttcatgcttcttatttgttgacttctggagatttgagatttttgtttactgctccttattctccttctttgtctgctggagaagctcaaccttctgctactgcttctattccttcttttgatcatgcttcttgtagatcttttttttcttctcatggattgggagttagagctgttgctattgaagttgaagatgctgaatctgctttttctatttctgttgctaatggagctgttccttcttctcctcctaatgttttgaatggagctgttactattgctgaagttaagttgtatggagatgttgttttgagatatgtttcttattataatggaactgtttcttttttgcctggatttgaatctgttgatgatacttcttcttttcctttggattatggaattagaagattggatcatgctgttggaaatgttcctgaattgggacctgctttgacttatttggctggatttactggatttcatcaatttgctgaatttactgctgatgatgttggaactgctgaatctggattgaattctgctgttttggctaataatgatgaaatggttttgttgcctattaatgaacctgttcatggaactaagagaaagtctcaaattcaaacttttttggaacataatgaaggagctggattgcaacatttggctttgatgtctgaagatatttttagaactttgagagaaatgagaaagagatctggagttggaggatttgattttatgccttctcctcctcctacttattataagaatttgaagaagagagttggagatgttttgtctgaagaacaaattgaagaatgtgaagaattgggaattttggttgatagagatgatcaaggaactttgttgcaaattggaactaagcctttgggagatagacctactatttttattgaaattattcaaagagttggatgtatgaagagagatgaagaaggaaaggtttatcaatctggaggatgtggaggatttggaaagggaaatttttctgaattgtttaagtctattgaagaatatgaaaagactttggaagctaagcaattggttggatga

SEQ ID NO: 319 - protein, 450 aa, Artificial Sequence
  HaHPPDm-F372G Amino Acid Sequence
MGTEATVAAVVAGDESDHPTSAFKLVGFKNFIRTNPMSDKFTVKNFHHIEFWCSDATNTARRFSWGLGMPIIFKSDLSTGNSTHASYLLRSGHLNFLFTAPYSPSISPTTTTASIPTFSHSASRHFTATHGLAVRAIAVEVEDAETAFAVSVANGAKPSSPPVTLGHNDVVLSEVKLYGDVVLRYVSYKNNTNNNNNNDNDNYIFLPGFEAMDKTSSFQELDYGIRRLDHAVGNVPELAPAVDYVKSFTGFHEFAEFTAEDVGTSESGLNSVVLACNSEMVLIPMNEPVYGTKRKSQIQTYLEHNEGAGVQHLALASEDIFRTLREMRKRSGVGGFEFMPSPPPTYYRNLKSRAGDVLSDEQIKECEELGILVDRDDQGTLLQIGTKPVGDRPTIFIEIIQRVGCMVKDDEGKVQQKAGCGGFGKGNFSELFKSIEEYEKTLEARSTTAA

SEQ ID NO: 320 - DNA, 1353 bp, Artificial Sequence
  HaHPPDm-F372G Nucleotide Sequence
atgggaactgaagctactgttgctgctgttgttgctggagatgaatctgatcatcctacttctgcttttaagttggttggatttaagaattttattagaactaatcctatgtctgataagtttactgttaagaattttcatcatattgaattttggtgttctgatgctactaatactgctagaagattttcttggggattgggaatgcctattatttttaagtctgatttgtctactggaaattctactcatgcttcttatttgttgagatctggacatttgaattttttgtttactgctccttattctccttctatttctcctactactactactgcttctattcctactttttctcattctgcttctagacattttactgctactcatggattggctgttagagctattgctgttgaagttgaagatgctgaaactgcttttgctgtttctgttgctaatggagctaagccttcttctcctcctgttactttgggacataatgatgttgttttgtctgaagttaagttgtatggagatgttgttttgagatatgtttcttataagaataatactaataataataataataatgataatgataattatatttttttgcctggatttgaagctatggataagacttcttcttttcaagaattggattatggaattagaagattggatcatgctgttggaaatgttcctgaattggctcctgctgttgattatgttaagtcttttactggatttcatgaatttgctgaatttactgctgaagatgttggaacttctgaatctggattgaattctgttgttttggcttgtaattctgaaatggttttgattcctatgaatgaacctgtttatggaactaagagaaagtctcaaattcaaacttatttggaacataatgaaggagctggagttcaacatttggctttggcttctgaagatatttttagaactttgagagaaatgagaaagagatctggagttggaggatttgaatttatgccttctcctcctcctacttattatagaaatttgaagtctagagctggagatgttttgtctgatgaacaaattaaggaatgtgaagaattgggaattttggttgatagagatgatcaaggaactttgttgcaaattggaactaagcctgttggagatagacctactatttttattgaaattattcaaagagttggatgtatggttaaggatgatgaaggaaaggttcaacaaaaggctggatgtggaggatttggaaagggaaatttttctgaattgtttaagtctattgaagaatatgaaaagactttggaagctagatctactactgctgcttga

SEQ ID NO: 321 - protein, 435 aa, Artificial Sequence
  MsHPPDm-F372G Amino Acid Sequence
MAIETETQTQTGFKLVGFKNFVRANPKSDRFKVKRFHHVEFWCTDATNTARRFSHGLGMPIVAKSDLSTGNQTHASYLLRSGDLNFLFSAAYSPSISLSSPSSTAAIPTFSASNCFSFSASHGLAVRAVAVEVEDAELAFTTSVNNGAIPSSPPVILENHVKLAEVRLYGDVVLRYVSYNDPNPNQNPNLLFLPGFERVSDESSNSSLDFGIRRLDHAVGNVPELSSAVKYVKDFTGFHEFAEFTAEDVGTSESGLNSVVLANNEETVLLPMNEPVYGTKRKSQIETYLEHNEGAGLQHLALKSEDIFRTLREMRKRSGVGGFEFMPSPPVTYYRNLKNRVGDVLSDEQIKECEELGILVDRDDQGTLLQIGTKPIGDRPTIFIEIIQRVGCMLKDEEGKEYQKGGCGGFGKGNFSELFKSIEEYEKTLETRRTA

SEQ ID NO: 322 - DNA, 1308 bp, Artificial Sequence
  MsHPPDm-F372G Nucleotide Sequence
atggctattgaaactgaaactcaaactcaaactggatttaagttggttggatttaagaattttgttagagctaatcctaagtctgatagatttaaggttaagagatttcatcatgttgaattttggtgtactgatgctactaatactgctagaagattttctcatggattgggaatgcctattgttgctaagtctgatttgtctactggaaatcaaactcatgcttcttatttgttgagatctggagatttgaattttttgttttctgctgcttattctccttctatttctttgtcttctccttcttctactgctgctattcctactttttctgcttctaattgtttttctttttctgcttctcatggattggctgttagagctgttgctgttgaagttgaagatgctgaattggcttttactacttctgttaataatggagctattccttcttctcctcctgttattttggaaaatcatgttaagttggctgaagttagattgtatggagatgttgttttgagatatgtttcttataatgatcctaatcctaatcaaaatcctaatttgttgtttttgcctggatttgaaagagtttctgatgaatcttctaattcttctttggattttggaattagaagattggatcatgctgttggaaatgttcctgaattgtcttctgctgttaagtatgttaaggattttactggatttcatgaatttgctgaatttactgctgaagatgttggaacttctgaatctggattgaattctgttgttttggctaataatgaagaaactgttttgttgcctatgaatgaacctgtttatggaactaagagaaagtctcaaattgaaacttatttggaacataatgaaggagctggattgcaacatttggctttgaagtctgaagatatttttagaactttgagagaaatgagaaagagatctggagttggaggatttgaatttatgccttctcctcctgttacttattatagaaatttgaagaatagagttggagatgttttgtctgatgaacaaattaaggaatgtgaagaattgggaattttggttgatagagatgatcaaggaactttgttgcaaattggaactaagcctattggagatagacctactatttttattgaaattattcaaagagttggatgtatgttgaaggatgaagaaggaaaggaatatcaaaagggaggatgtggaggatttggaaagggaaatttttctgaattgtttaagtctattgaagaatatgaaaagactttggaaactagaagaactgcttga

SEQ ID NO: 323 - protein, 434 aa, Artificial Sequence
  BvHPPDm-F372G Amino Acid Sequence
MGTLSPQPQTSPSQFKLVGYSNFIRVNPLSDLFPVKRFHHVEFWCGDATNVSRRFSWGLGMPIVAKSDLSTGNSVHASYLLRSGELHFLFTSPYSPSLSSPSSATIPTFSFSLFTSFLTSHGLAVRAVAVEVQDAEAAFHISVSNGASPVSPPIRLHDGVVLSEVHLYGDVVLRYVSTSSVVDGIFLPGFEEMLGESSFQELDFGLRRLDHAVGNVPELAPAIEYVKKFTGFHEFAEFTTEDVGTSESGLNSAVVANNDETVLFPMNEPVYGTKRKSQIQTYLEHNEGAGVQHLALMSEDIFWTLREMRKRSGLGGFEFMPSPPPTYYRNLRNRAADVLSEEQMKECEELGILVDKDDQGTLLQIGTKPIGDRPTMFIEIIQRIGCMMKDEEGKVYQKGGCGGFGKGNFSELFKSIEEYEKTLERKPIADTNAT

SEQ ID NO: 324 - DNA, 1305 bp, Artificial Sequence
  BvHPPDm-F372G Nucleotide Sequence
atgggaactttgtctcctcaacctcaaacttctccttctcaatttaagttggttggatattctaattttattagagttaatcctttgtctgatttgtttcctgttaagagatttcatcatgttgaattttggtgtggagatgctactaatgtttctagaagattttcttggggattgggaatgcctattgttgctaagtctgatttgtctactggaaattctgttcatgcttcttatttgttgagatctggagaattgcattttttgtttacttctccttattctccttctttgtcttctccttcttctgctactattcctactttttctttttctttgtttacttcttttttgacttctcatggattggctgttagagctgttgctgttgaagttcaagatgctgaagctgcttttcatatttctgtttctaatggagcttctcctgtttctcctcctattagattgcatgatggagttgttttgtctgaagttcatttgtatggagatgttgttttgagatatgtttctacttcttctgttgttgatggaatttttttgcctggatttgaagaaatgttgggagaatcttcttttcaagaattggattttggattgagaagattggatcatgctgttggaaatgttcctgaattggctcctgctattgaatatgttaagaagtttactggatttcatgaatttgctgaatttactactgaagatgttggaacttctgaatctggattgaattctgctgttgttgctaataatgatgaaactgttttgtttcctatgaatgaacctgtttatggaactaagagaaagtctcaaattcaaacttatttggaacataatgaaggagctggagttcaacatttggctttgatgtctgaagatattttttggactttgagagaaatgagaaagagatctggattgggaggatttgaatttatgccttctcctcctcctacttattatagaaatttgagaaatagagctgctgatgttttgtctgaagaacaaatgaaggaatgtgaagaattgggaattttggttgataaggatgatcaaggaactttgttgcaaattggaactaagcctattggagatagacctactatgtttattgaaattattcaaagaattggatgtatgatgaaggatgaagaaggaaaggtttatcaaaagggaggatgtggaggatttggaaagggaaatttttctgaattgtttaagtctattgaagaatatgaaaagactttggaaagaaagcctattgctgatactaatgctacttga

SEQ ID NO: 325 - protein, 447 aa, Artificial Sequence
  NtHPPDm-F372G Amino Acid Sequence
MGKLETVTTTSAAAADDSSELTTNFKLVGFKNFIRTNPRSDFFSVKSFHHIEFWCGDATNTARRFSWSLGMPIAAKSDLSTGNSVHASYLLRPVSGSLQFLFTAPYSPSISTPSSAAIPSFSTSTHRSFTTTHGLGVRAVALEVENAYTAFSASVSRGAKPMFEPVTIDEQVAMAEVHLYGDVVLRFVSYLKDADNLVFLPGFEAMDETASYKELDYGIRRLDHAVGNVPELGPVVDYIKRFTGFHEFAEFTAEDVGTAESGLNSMVLANNDETVLLPLNEPVYGTKRKSQIQTYLEHNEGAGVQHLALVTEDIFKTLTEMRKRSGVGGFEFMPSPPPTYYKNLKNRAGDVLSDEQILACEELGILVDRDDQGTLLQIGTKPVGDRPTIFIEIIQRIGCMLKDGKGQVYQKGGCGGFGKGNFSELFRSIEEYEKTLEAKQANQVAAA

SEQ ID NO: 326 - DNA, 1344 bp, Artificial Sequence
  NtHPPDm-F372G Nucleotide Sequence
atgggaaagttggaaactgttactactacttctgctgctgctgctgatgattcttctgaattgactactaattttaagttggttggatttaagaattttattagaactaatcctagatctgattttttttctgttaagtcttttcatcatattgaattttggtgtggagatgctactaatactgctagaagattttcttggtctttgggaatgcctattgctgctaagtctgatttgtctactggaaattctgttcatgcttcttatttgttgagacctgtttctggatctttgcaatttttgtttactgctccttattctccttctatttctactccttcttctgctgctattccttctttttctacttctactcatagatcttttactactactcatggattgggagttagagctgttgctttggaagttgaaaatgcttatactgctttttctgcttctgtttctagaggagctaagcctatgtttgaacctgttactattgatgaacaagttgctatggctgaagttcatttgtatggagatgttgttttgagatttgtttcttatttgaaggatgctgataatttggtttttttgcctggatttgaagctatggatgaaactgcttcttataaggaattggattatggaattagaagattggatcatgctgttggaaatgttcctgaattgggacctgttgttgattatattaagagatttactggatttcatgaatttgctgaatttactgctgaagatgttggaactgctgaatctggattgaattctatggttttggctaataatgatgaaactgttttgttgcctttgaatgaacctgtttatggaactaagagaaagtctcaaattcaaacttatttggaacataatgaaggagctggagttcaacatttggctttggttactgaagatatttttaagactttgactgaaatgagaaagagatctggagttggaggatttgaatttatgccttctcctcctcctacttattataagaatttgaagaatagagctggagatgttttgtctgatgaacaaattttggcttgtgaagaattgggaattttggttgatagagatgatcaaggaactttgttgcaaattggaactaagcctgttggagatagacctactatttttattgaaattattcaaagaattggatgtatgttgaaggatggaaagggacaagtttatcaaaagggaggatgtggaggatttggaaagggaaatttttctgaattgtttagatctattgaagaatatgaaaagactttggaagctaagcaagctaatcaagttgctgctgcttga

SEQ ID NO: 327 - protein, 455 aa, Artificial Sequence
  CsHPPDm-F372G Amino Acid Sequence
MGKEADFPRAPSEATDGGATASQSEFELQGFDNFIRTNPKSDRFKVKRFHHIEFWCTDATNVARRFSWGLGMQIVAKSDLSTGNMTHASYLLRSGHLCFLFTAPYSPSIAAAQNLTPASTASIPSFDHSVCRSFSGTHGFGARAIALEVEDAEIAFRTSVAHGAKPSCPPIVLENRAVLSEVHLYGDVVLRYISYKNPVSGDNGENKPDEWFLPKFEAMEETASFPLDFGIRRLDHAVGNVPELGPAVSYLKGFTGFHEFAEFTAEDVGTSESGLNSMVLANNEEMVLLPINEPVFGTKRKSQIQTYLEHNEGAGVQHLALMSEDIFRTLREMRKRSSVGGFEFMPSPPPTYYKNLKSRAGDVLTDEQIKECEELGILVDKDDQGTLLQIGTKPVGDRPTIFIEIIQRLGCMMKDEEGKAFQKGGCGGFGKGNFSELFKSIEEYEKTLEAKRVSE

SEQ ID NO: 328 - DNA, 1368 bp, Artificial Sequence
  CsHPPDm-F372G Nucleotide Sequence
atgggaaaggaagctgattttcctagagctccttctgaagctactgatggaggagctactgcttctcaatctgaatttgaattgcaaggatttgataattttattagaactaatcctaagtctgatagatttaaggttaagagatttcatcatattgaattttggtgtactgatgctactaatgttgctagaagattttcttggggattgggaatgcaaattgttgctaagtctgatttgtctactggaaatatgactcatgcttcttatttgttgagatctggacatttgtgttttttgtttactgctccttattctccttctattgctgctgctcaaaatttgactcctgcttctactgcttctattccttcttttgatcattctgtttgtagatctttttctggaactcatggatttggagctagagctattgctttggaagttgaagatgctgaaattgcttttagaacttctgttgctcatggagctaagccttcttgtcctcctattgttttggaaaatagagctgttttgtctgaagttcatttgtatggagatgttgttttgagatatatttcttataagaatcctgtttctggagataatggagaaaataagcctgatgaatggtttttgcctaagtttgaagctatggaagaaactgcttcttttcctttggattttggaattagaagattggatcatgctgttggaaatgttcctgaattgggacctgctgtttcttatttgaagggatttactggatttcatgaatttgctgaatttactgctgaagatgttggaacttctgaatctggattgaattctatggttttggctaataatgaagaaatggttttgttgcctattaatgaacctgtttttggaactaagagaaagtctcaaattcaaacttatttggaacataatgaaggagctggagttcaacatttggctttgatgtctgaagatatttttagaactttgagagaaatgagaaagagatcttctgttggaggatttgaatttatgccttctcctcctcctacttattataagaatttgaagtctagagctggagatgttttgactgatgaacaaattaaggaatgtgaagaattgggaattttggttgataaggatgatcaaggaactttgttgcaaattggaactaagcctgttggagatagacctactatttttattgaaattattcaaagattgggatgtatgatgaaggatgaagaaggaaaggcttttcaaaagggaggatgtggaggatttggaaagggaaatttttctgaattgtttaagtctattgaagaatatgaaaagactttggaagctaagagagtttctgaatga

SEQ ID NO: 329 - protein, 447 aa, Artificial Sequence
  StHPPDm-F372G Amino Acid Sequence
MGKQAATATATATATADDQQLPADIEDKYKLVGFNNFVRTNPRSDLFNVKRFHHIEFWCGDATNTARRFSWGLGLPIAAKSDLSTGNSVHASYLLRSSSSQLQFLFTAPYSPAISTPSSSSIPTFSVSSHRSFTETHGLGVRAIALEVENSRLAFSTCVSHGAKPVSEPVILNDEVVISEVHLYGDVVLRFVSFLKDSNRFVFLPGFELVEGAQLDYGIRRLDHAVGNVPQLGPVVEYIKSFTGFHEFAEFTAEDVGTAESGLNSVVLANNDETVLFPLNEPVYGTKRKSQIQTYLEHNEGAGVQHLALVTEDIFRTLREMRKRSGIGGFEFMPSPPPTYYKNLKSRAGDILSDEQIKECEELGILVDRDDQGTLLQIGTKPVGDRPTIFLEIIQRIGCMLQNAEGELYQKGGCGGFGKGNFSELFKSIEEYEKTLEAKQNTQVAIA

SEQ ID NO: 330 - DNA, 1344 bp, Artificial Sequence
  StHPPDm-F372G Nucleotide Sequence
atgggaaagcaagctgctactgctactgctactgctactgctactgctgatgatcaacaattgcctgctgatattgaagataagtataagttggttggatttaataattttgttagaactaatcctagatctgatttgtttaatgttaagagatttcatcatattgaattttggtgtggagatgctactaatactgctagaagattttcttggggattgggattgcctattgctgctaagtctgatttgtctactggaaattctgttcatgcttcttatttgttgagatcttcttcttctcaattgcaatttttgtttactgctccttattctcctgctatttctactccttcttcttcttctattcctactttttctgtttcttctcatagatcttttactgaaactcatggattgggagttagagctattgctttggaagttgaaaattctagattggctttttctacttgtgtttctcatggagctaagcctgtttctgaacctgttattttgaatgatgaagttgttatttctgaagttcatttgtatggagatgttgttttgagatttgtttcttttttgaaggattctaatagatttgtttttttgcctggatttgaattggttgaaggagctcaattggattatggaattagaagattggatcatgctgttggaaatgttcctcaattgggacctgttgttgaatatattaagtcttttactggatttcatgaatttgctgaatttactgctgaagatgttggaactgctgaatctggattgaattctgttgttttggctaataatgatgaaactgttttgtttcctttgaatgaacctgtttatggaactaagagaaagtctcaaattcaaacttatttggaacataatgaaggagctggagttcaacatttggctttggttactgaagatatttttagaactttgagagaaatgagaaagagatctggaattggaggatttgaatttatgccttctcctcctcctacttattataagaatttgaagtctagagctggagatattttgtctgatgaacaaattaaggaatgtgaagaattgggaattttggttgatagagatgatcaaggaactttgttgcaaattggaactaagcctgttggagatagacctactatttttttggaaattattcaaagaattggatgtatgttgcaaaatgctgaaggagaattgtatcaaaagggaggatgtggaggatttggaaagggaaatttttctgaattgtttaagtctattgaagaatatgaaaagactttggaagctaagcaaaatactcaagttgctattgcttga

SEQ ID NO: 331 - protein, 441 aa, Artificial Sequence
  SlHPPDm-F372G Amino Acid Sequence
MGKQAAAAADDQQLPGDIEDKFKLVGFNHFVRTNPRSDFFTVKRFHHIEFWCGDATNTARRFSWGLGLPIAAISDLSTGNSVHASYLLRSSSSSQLQFLFTAPYSSAISTSSSASIPTFSVSSHRSFTATHGLGVRAIALEVENSRLAFSTCVAHGAKPVSEPVILNDEVVIAEVHLYGDVVLRFVSFLKDSNCFVFLPGFESVEGAQLDYGIRRLDHAVGNVPELGPVVEYIKSFTGFHEFAEFTAEDVGTAESGLNSVVLANNDETVLFPLNEPVYGTKRKSQIQTYLEHNEGAGVQHLALVTEDIFRTLREMRKRSGIGGFEFMPSPPPTYYKNLKTRAGDILSDEQIQECEELGILVDRDDQGTLLQIGTKPVGDRPTIFLEIIQRIGCMLKNEEGELYQKGGCGGFGKGNFSELFKSIEEYEKTLEAKQNTQVAIA

SEQ ID NO: 332 - DNA, 1326 bp, Artificial Sequence
  SlHPPDm-F372G Nucleotide Sequence
atgggaaagcaagctgctgctgctgctgatgatcaacaattgcctggagatattgaagataagtttaagttggttggatttaatcattttgttagaactaatcctagatctgatttttttactgttaagagatttcatcatattgaattttggtgtggagatgctactaatactgctagaagattttcttggggattgggattgcctattgctgctatttctgatttgtctactggaaattctgttcatgcttcttatttgttgagatcttcttcttcttctcaattgcaatttttgtttactgctccttattcttctgctatttctacttcttcttctgcttctattcctactttttctgtttcttctcatagatcttttactgctactcatggattgggagttagagctattgctttggaagttgaaaattctagattggctttttctacttgtgttgctcatggagctaagcctgtttctgaacctgttattttgaatgatgaagttgttattgctgaagttcatttgtatggagatgttgttttgagatttgtttcttttttgaaggattctaattgttttgtttttttgcctggatttgaatctgttgaaggagctcaattggattatggaattagaagattggatcatgctgttggaaatgttcctgaattgggacctgttgttgaatatattaagtcttttactggatttcatgaatttgctgaatttactgctgaagatgttggaactgctgaatctggattgaattctgttgttttggctaataatgatgaaactgttttgtttcctttgaatgaacctgtttatggaactaagagaaagtctcaaattcaaacttatttggaacataatgaaggagctggagttcaacatttggctttggttactgaagatatttttagaactttgagagaaatgagaaagagatctggaattggaggatttgaatttatgccttctcctcctcctacttattataagaatttgaagactagagctggagatattttgtctgatgaacaaattcaagaatgtgaagaattgggaattttggttgatagagatgatcaaggaactttgttgcaaattggaactaagcctgttggagatagacctactatttttttggaaattattcaaagaattggatgtatgttgaagaatgaagaaggagaattgtatcaaaagggaggatgtggaggatttggaaagggaaatttttctgaattgtttaagtctattgaagaatatgaaaagactttggaagctaagcaaaatactcaagttgctattgcttga

SEQ ID NO: 333 - protein, 504 aa, Artificial Sequence
  AhHPPDm-F372G Amino Acid Sequence
MATAYTYAHAVTYCNSQHNPPIIPILSTNQHPPRVTLPSSIPHFISTITTFNLKHFPSHSLHTVMVTQTQQNAPSSSPELGFKLVGFKNFVRTNPKSDRFKVIRFHHVEFWCTDATNTASRFSWGLGMPIVAKSDLSTGNAVHASYLLRSGDLNFLFSAPYSASIAGDGASASFPSFSASDCHSFAAKHGLAVRAVAIEVEDASAAFSASVANGAKPVSPAVLLDNSVGFAEVHLYGDVVLRYISYSAPTRESNLNPTLRFLPGFEAVEADSSFPELDYGIRRLDHAVGNVPELAPAVNYLKKFTGFHEFAEFTAEDVGTSESGLNSVVLASNDEMVLLPLNEPVYGTKRKSQIETYLEHNEGAGLQHLALVSEDIFRTLREMRKRSTIGGFQFMPSPPPTYYRNLKKRAGDVLSDEQIKECEELGILVDRDDQGTLLQIGTKPVGDRPTIFIEIIQRIGCMLKDEEGKVYQKGGCGGFGKGNFSELFKSIEEYEKTLESRRTA

SEQ ID NO: 334 - DNA, 1515 bp, Artificial Sequence
  AhHPPDm-F372G Nucleotide Sequence
atggctactgcttatacttatgctcatgctgttacttattgtaattctcaacataatcctcctattattcctattttgtctactaatcaacatcctcctagagttactttgccttcttctattcctcattttatttctactattactacttttaatttgaagcattttccttctcattctttgcatactgttatggttactcaaactcaacaaaatgctccttcttcttctcctgaattgggatttaagttggttggatttaagaattttgttagaactaatcctaagtctgatagatttaaggttattagatttcatcatgttgaattttggtgtactgatgctactaatactgcttctagattttcttggggattgggaatgcctattgttgctaagtctgatttgtctactggaaatgctgttcatgcttcttatttgttgagatctggagatttgaattttttgttttctgctccttattctgcttctattgctggagatggagcttctgcttcttttccttctttttctgcttctgattgtcattcttttgctgctaagcatggattggctgttagagctgttgctattgaagttgaagatgcttctgctgctttttctgcttctgttgctaatggagctaagcctgtttctcctgctgttttgttggataattctgttggatttgctgaagttcatttgtatggagatgttgttttgagatatatttcttattctgctcctactagagaatctaatttgaatcctactttgagatttttgcctggatttgaagctgttgaagctgattcttcttttcctgaattggattatggaattagaagattggatcatgctgttggaaatgttcctgaattggctcctgctgttaattatttgaagaagtttactggatttcatgaatttgctgaatttactgctgaagatgttggaacttctgaatctggattgaattctgttgttttggcttctaatgatgaaatggttttgttgcctttgaatgaacctgtttatggaactaagagaaagtctcaaattgaaacttatttggaacataatgaaggagctggattgcaacatttggctttggtttctgaagatatttttagaactttgagagaaatgagaaagagatctactattggaggatttcaatttatgccttctcctcctcctacttattatagaaatttgaagaagagagctggagatgttttgtctgatgaacaaattaaggaatgtgaagaattgggaattttggttgatagagatgatcaaggaactttgttgcaaattggaactaagcctgttggagatagacctactatttttattgaaattattcaaagaattggatgtatgttgaaggatgaagaaggaaaggtttatcaaaagggaggatgtggaggatttggaaagggaaatttttctgaattgtttaagtctattgaagaatatgaaaagactttggaatctagaagaactgcttga

SEQ ID NO: 335 - protein, 339 aa, Artificial Sequence
  CyHPPDm-F372G Amino Acid Sequence
MEFDYLHLYVDDYQSAHRCYQRQWGFTCVNKIITDQGITGIYQQGQILLLISASESSLSRYADYLQKHPPGVGEVAWQVANWQKIQHQLSELQIETTPVIHPLTKAEGLTFLLWGDVHHSIYPVRSELNQNKTLHGVGLTTIDHVVLNIAADQFTQASQWYQQVFGWSVQQSFTVNTPHSGLYSEALASANGKVQFNLNCPTNNSSQIQTFLANNHGAGIQHVAFSTTSITRTVAHLRERGVNFLKIPTGYYQQQRNSSYFNYASLDWDTLQCLEILLDDQDNTGERLLLQIGSQPCYGVGTLFWEIIERRHRAKGFGQGNFQALYEAVETLEKQLEVP

SEQ ID NO: 336 - DNA, 1020 bp, Artificial Sequence
  CyHPPDm-F372G Nucleotide Sequence
atggaatttgattatttgcatttgtatgttgatgattatcaatctgctcatagatgttatcaaagacaatggggatttacttgtgttaataagattattactgatcaaggaattactggaatttatcaacaaggacaaattttgttgttgatttctgcttctgaatcttctttgtctagatatgctgattatttgcaaaagcatcctcctggagttggagaagttgcttggcaagttgctaattggcaaaagattcaacatcaattgtctgaattgcaaattgaaactactcctgttattcatcctttgactaaggctgaaggattgacttttttgttgtggggagatgttcatcattctatttatcctgttagatctgaattgaatcaaaataagactttgcatggagttggattgactactattgatcatgttgttttgaatattgctgctgatcaatttactcaagcttctcaatggtatcaacaagtttttggatggtctgttcaacaatcttttactgttaatactcctcattctggattgtattctgaagctttggcttctgctaatggaaaggttcaatttaatttgaattgtcctactaataattcttctcaaattcaaacttttttggctaataatcatggagctggaattcaacatgttgctttttctactacttctattactagaactgttgctcatttgagagaaagaggagttaattttttgaagattcctactggatattatcaacaacaaagaaattcttcttattttaattatgcttctttggattgggatactttgcaatgtttggaaattttgttggatgatcaagataatactggagaaagattgttgttgcaaattggatctcaaccttgttatggagttggaactttgttttgggaaattattgaaagaagacatagagctaagggatttggacaaggaaattttcaagctttgtatgaagctgttgaaactttggaaaagcaattggaagttccttga

SEQ ID NO: 337 - protein, 350 aa, Artificial Sequence
  N1HPPDm-F372G Amino Acid Sequence
MAADSENPLGLHGFAFAEFTSPDPAAMARQFEQLGFVPAARRKDRGLTLYRQGRIAFILNAGEGEQASAFRAAHGPSANGMAFNVADAKAAHRHAIQSGATDADTAQSALPGTYAIEGIGDSLLYLVDSDPFADWDEVPGWREASAERGVGLDLLDHLTHNVRRGQMRVWSEFYATLFGFEEQKFFDIKGQATGLFSQAMIAPDHEIRIPLNESQDDNSQIEEFIREYNGEGIQHLALTTPDIYSTVEKLRANGVRLQDTIDTYYDLVDERVPGHGEDLARLRKNRILIDGDVHDEGLLLQIGTETMFGPIFFEIIQRKGNEGFGNGNFQVLYESIELDQIRRGVVTVDA

SEQ ID NO: 338 - DNA, 1053 bp, Artificial Sequence
  N1HPPDm-F372G Nucleotide Sequence
atggctgctgattctgaaaatcctttgggattgcatggatttgcttttgctgaatttacttctcctgatcctgctgctatggctagacaatttgaacaattgggatttgttcctgctgctagaagaaaggatagaggattgactttgtatagacaaggaagaattgcttttattttgaatgctggagaaggagaacaagcttctgcttttagagctgctcatggaccttctgctaatggaatggcttttaatgttgctgatgctaaggctgctcatagacatgctattcaatctggagctactgatgctgatactgctcaatctgctttgcctggaacttatgctattgaaggaattggagattctttgttgtatttggttgattctgatccttttgctgattgggatgaagttcctggatggagagaagcttctgctgaaagaggagttggattggatttgttggatcatttgactcataatgttagaagaggacaaatgagagtttggtctgaattttatgctactttgtttggatttgaagaacaaaagttttttgatattaagggacaagctactggattgttttctcaagctatgattgctcctgatcatgaaattagaattcctttgaatgaatctcaagatgataattctcaaattgaagaatttattagagaatataatggagaaggaattcaacatttggctttgactactcctgatatttattctactgttgaaaagttgagagctaatggagttagattgcaagatactattgatacttattatgatttggttgatgaaagagttcctggacatggagaagatttggctagattgagaaagaatagaattttgattgatggagatgttcatgatgaaggattgttgttgcaaattggaactgaaactatgtttggacctattttttttgaaattattcaaagaaagggaaatgaaggatttggaaatggaaattttcaagttttgtatgaatctattgaattggatcaaattagaagaggagttgttactgttgatgcttga

SEQ ID NO: 339 - protein, 363 aa, Artificial Sequence
  N2HPPDm-F372G Amino Acid Sequence
MTLFDNPLGLDGFEFVEFSAPAKGMLEPVFAAMGFVMIARHRSKDVQLWRQGGINLIANYEPRSPAAYFAAEHGPSACGMGWRVRNAAKAYELAVERGAEPVDVKTGPMELRLPAIRGIGGSIIYLIDRYEDEDGGLSIYDIDFVYEPGVDRHPEGAGFKIIDHLTHNVYGGRMAHWASFYERVFGFREIRYFDIKGEYTGLTSKAMTAPDGKIRIPLNEEGKAGGGQIEEFLRAYNGEGIQHIAFLCDDLIAAWDKLKALGTPLMTAPPATYYEMLDERLPGHGEPVAELQKRGILLDGSTQQGDPRLLLQIGGQATIGPVFFEFIQRKKDEGFGEGNFTALFESMERDQLRRGTLNAGESA

SEQ ID NO: 340 - DNA, 1092 bp, Artificial Sequence
  N2HPPDm-F372G Nucleotide Sequence
atgactttgtttgataatcctttgggattggatggatttgaatttgttgaattttctgctcctgctaagggaatgttggaacctgtttttgctgctatgggatttgttatgattgctagacatagatctaaggatgttcaattgtggagacaaggaggaattaatttgattgctaattatgaacctagatctcctgctgcttattttgctgctgaacatggaccttctgcttgtggaatgggatggagagttagaaatgctgctaaggcttatgaattggctgttgaaagaggagctgaacctgttgatgttaagactggacctatggaattgagattgcctgctattagaggaattggaggatctattatttatttgattgatagatatgaagatgaagatggaggattgtctatttatgatattgattttgtttatgaacctggagttgatagacatcctgaaggagctggatttaagattattgatcatttgactcataatgtttatggaggaagaatggctcattgggcttctttttatgaaagagtttttggatttagagaaattagatattttgatattaagggagaatatactggattgacttctaaggctatgactgctcctgatggaaagattagaattcctttgaatgaagaaggaaaggctggaggaggacaaattgaagaatttttgagagcttataatggagaaggaattcaacatattgcttttttgtgtgatgatttgattgctgcttgggataagttgaaggctttgggaactcctttgatgactgctcctcctgctacttattatgaaatgttggatgaaagattgcctggacatggagaacctgttgctgaattgcaaaagagaggaattttgttggatggatctactcaacaaggagatcctagattgttgttgcaaattggaggacaagctactattggacctgttttttttgaatttattcaaagaaagaaggatgaaggatttggagaaggaaattttactgctttgtttgaatctatggaaagagatcaattgagaagaggaactttgaatgctggagaatctgcttga

SEQ ID NO: 341 - protein, 365 aa, Artificial Sequence
  N3HPPDm-F372G Amino Acid Sequence
MQIPNWENPVGTDGFEFIEYTAPDPKALGQLFERMGFTAIARHRHKDVTVYRQGDINFIINAEPHSFAQRFARLHGPSICAIAFRVQDAAKAYQHALELGAWGFDNKTGPMELNIPAIKGIGDSLIYFVDRWRGKNGAQPGAIGDISIYDVDFEPIAGANPNPAGHGLTYIDHLTHNVHRGRMQEWAEFYERLFNFREVRYFDIEGKVTGVKSKAMTSPCGKIRIPINEEGSDTAGQIQEYLDAYHGEGIQHIALGTNDIYGAVDGLRGKEVKLLDTIDTYYELVDRRVPDHGESLDELKKRKILIDGARDDLLLQIGTENQIGPIFFEIIQRKGNQGFGEGNFKALFESIELDQIRRGVVQDKA

SEQ ID NO: 342 - DNA, 1098 bp, Artificial Sequence
  N3HPPDm-F372G Nucleotide Sequence
atgcaaattcctaattgggaaaatcctgttggaactgatggatttgaatttattgaatatactgctcctgatcctaaggctttgggacaattgtttgaaagaatgggatttactgctattgctagacatagacataaggatgttactgtttatagacaaggagatattaattttattattaatgctgaacctcattcttttgctcaaagatttgctagattgcatggaccttctatttgtgctattgcttttagagttcaagatgctgctaaggcttatcaacatgctttggaattgggagcttggggatttgataataagactggacctatggaattgaatattcctgctattaagggaattggagattctttgatttattttgttgatagatggagaggaaagaatggagctcaacctggagctattggagatatttctatttatgatgttgattttgaacctattgctggagctaatcctaatcctgctggacatggattgacttatattgatcatttgactcataatgttcatagaggaagaatgcaagaatgggctgaattttatgaaagattgtttaattttagagaagttagatattttgatattgaaggaaaggttactggagttaagtctaaggctatgacttctccttgtggaaagattagaattcctattaatgaagaaggatctgatactgctggacaaattcaagaatatttggatgcttatcatggagaaggaattcaacatattgctttgggaactaatgatatttatggagctgttgatggattgagaggaaaggaagttaagttgttggatactattgatacttattatgaattggttgatagaagagttcctgatcatggagaatctttggatgaattgaagaagagaaagattttgattgatggagctagagatgatttgttgttgcaaattggaactgaaaatcaaattggacctattttttttgaaattattcaaagaaagggaaatcaaggatttggagaaggaaattttaaggctttgtttgaatctattgaattggatcaaattagaagaggagttgttcaagataaggcttga

SEQ ID NO: 343 - protein, 365 aa, Artificial Sequence
  N4HPPDm-F372G Amino Acid Sequence
MQIPNWENPVGTDGFEFIEYTAPDPKALGQLFERMGFTAIARHRHKDVTVYRQGDINFIINAEPDSFAQRFARLHGPSICAIAFRVQDAAKAYQHALELGAWGFDNKTGPMELNIPAIKGIGDSLIYFVDRWRGKNGAQPGAIGDISIYDVDFEPIAGATPNPAGHGLTYIDHLTHNVHRGRMQEWAEFYERLFNFREVRYFDIEGKVTGVKSKAMTSPCGKIRIPINEEGSDTAGQIQEYLDAYHGEGIQHIALGTSDIYGAVDGLRGKEVKLLDTIDTYYELVDRRVPDHGESLDELKKRKILIDGARDDLLLQIGTENQIGPIFFEIIQRKGNQGFGEGTFKALFESIELDQIRRGVVQDKA

SEQ ID NO: 344 - DNA, 1098 bp, Artificial Sequence
  N4HPPDm-F372G Nucleotide Sequence
atgcaaattcctaattgggaaaatcctgttggaactgatggatttgaatttattgaatatactgctcctgatcctaaggctttgggacaattgtttgaaagaatgggatttactgctattgctagacatagacataaggatgttactgtttatagacaaggagatattaattttattattaatgctgaacctgattcttttgctcaaagatttgctagattgcatggaccttctatttgtgctattgcttttagagttcaagatgctgctaaggcttatcaacatgctttggaattgggagcttggggatttgataataagactggacctatggaattgaatattcctgctattaagggaattggagattctttgatttattttgttgatagatggagaggaaagaatggagctcaacctggagctattggagatatttctatttatgatgttgattttgaacctattgctggagctactcctaatcctgctggacatggattgacttatattgatcatttgactcataatgttcatagaggaagaatgcaagaatgggctgaattttatgaaagattgtttaattttagagaagttagatattttgatattgaaggaaaggttactggagttaagtctaaggctatgacttctccttgtggaaagattagaattcctattaatgaagaaggatctgatactgctggacaaattcaagaatatttggatgcttatcatggagaaggaattcaacatattgctttgggaacttctgatatttatggagctgttgatggattgagaggaaaggaagttaagttgttggatactattgatacttattatgaattggttgatagaagagttcctgatcatggagaatctttggatgaattgaagaagagaaagattttgattgatggagctagagatgatttgttgttgcaaattggaactgaaaatcaaattggacctattttttttgaaattattcaaagaaagggaaatcaaggatttggagaaggaacttttaaggctttgtttgaatctattgaattggatcaaattagaagaggagttgttcaagataaggcttga

SEQ ID NO: 345 - protein, 350 aa, Artificial Sequence
  N5HPPDm-F372G Amino Acid Sequence
MAADSENPLGLHGFAFAEFTSPDPAAMARQFEQLGFVPAARRKDRGLTLYRQGRIAFILNAGEGEQASAFRAAHGPSANGMAFNVADAKAAHRHAIQSGATDADTAQSALPGTYAIEGIGDSLLYLVDSDPFADWDEVPGWREASAERGVGLDLLDHLTHNVRRGQMRVWSEFYATLFGFEEQKFFDIKGQATGLFSQAMIAPDHEIRIPLNESQDDNSQIEEFIREYNGEGIQHLALTTPDIYSTVEKLRANGVRLQDTIDTYYDLVDERVPGHGEDLARLRKNRILIDGDVHDEGLLLQIGTETMFGPIFFEIIQRKGNEGFGNGNFQVLFESIELDQIRRGVVTVDA

SEQ ID NO: 346 - DNA, 1053 bp, Artificial Sequence
  N5HPPDm-F372G Nucleotide Sequence
atggctgctgattctgaaaatcctttgggattgcatggatttgcttttgctgaatttacttctcctgatcctgctgctatggctagacaatttgaacaattgggatttgttcctgctgctagaagaaaggatagaggattgactttgtatagacaaggaagaattgcttttattttgaatgctggagaaggagaacaagcttctgcttttagagctgctcatggaccttctgctaatggaatggcttttaatgttgctgatgctaaggctgctcatagacatgctattcaatctggagctactgatgctgatactgctcaatctgctttgcctggaacttatgctattgaaggaattggagattctttgttgtatttggttgattctgatccttttgctgattgggatgaagttcctggatggagagaagcttctgctgaaagaggagttggattggatttgttggatcatttgactcataatgttagaagaggacaaatgagagtttggtctgaattttatgctactttgtttggatttgaagaacaaaagttttttgatattaagggacaagctactggattgttttctcaagctatgattgctcctgatcatgaaattagaattcctttgaatgaatctcaagatgataattctcaaattgaagaatttattagagaatataatggagaaggaattcaacatttggctttgactactcctgatatttattctactgttgaaaagttgagagctaatggagttagattgcaagatactattgatacttattatgatttggttgatgaaagagttcctggacatggagaagatttggctagattgagaaagaatagaattttgattgatggagatgttcatgatgaaggattgttgttgcaaattggaactgaaactatgtttggacctattttttttgaaattattcaaagaaagggaaatgaaggatttggaaatggaaattttcaagttttgtttgaatctattgaattggatcaaattagaagaggagttgttactgttgatgcttga

SEQ ID NO: 347 - protein, 444 aa, Artificial Sequence
  ZmHPPDm-F372V Amino Acid Sequence
MPPTPTAAAAGAAVAAASAAEQAAFRLVGHRNFVRFNPRSDRFHTLAFHHVELWCADAASAAGRFSFGLGAPLAARSDLSTGNSAHASLLLRSGSLSFLFTAPYAHGADAATAALPSFSAAAARRFAADHGLAVRAVALRVADAEEAFRTSVAAGARPAFGPVDLGRGFRLAEVELYGDVVLRYVSYPDGAAGEPFLPGFEGVASPGAADYGLSRFDHIVGNVPELAPAAAYFAGFTGFHEFAEFTTEDVGTAESGLNSMVLANNSENVLLPLNEPVHGTKRRSQIQTFLDHHGGPGVQHMALASDDVLRTLREMQARSAMGGFEFMAPPTSDYYDGVRRRAGDVLTEAQIKECQELGVLVDRDDQGVLLQIVPKPVGDRPTLFLEIIQRIGCMERDEKGQEYQKGGCGGFGKGNFSQLFKSIEDYEKSLEAMQAAAAATAQGS

SEQ ID NO: 348 - DNA, 1335 bp, Artificial Sequence
  ZmHPPDm-F372V Nucleotide Sequence
atgcctcctactcctactgctgctgctgctggagctgctgttgctgctgcttctgctgctgaacaagctgcttttagattggttggacatagaaattttgttagatttaatcctagatctgatagatttcatactttggcttttcatcatgttgaattgtggtgtgctgatgctgcttctgctgctggaagattttcttttggattgggagctcctttggctgctagatctgatttgtctactggaaattctgctcatgcttctttgttgttgagatctggatctttgtcttttttgtttactgctccttatgctcatggagctgatgctgctactgctgctttgccttctttttctgctgctgctgctagaagatttgctgctgatcatggattggctgttagagctgttgctttgagagttgctgatgctgaagaagcttttagaacttctgttgctgctggagctagacctgcttttggacctgttgatttgggaagaggatttagattggctgaagttgaattgtatggagatgttgttttgagatatgtttcttatcctgatggagctgctggagaaccttttttgcctggatttgaaggagttgcttctcctggagctgctgattatggattgtctagatttgatcatattgttggaaatgttcctgaattggctcctgctgctgcttattttgctggatttactggatttcatgaatttgctgaatttactactgaagatgttggaactgctgaatctggattgaattctatggttttggctaataattctgaaaatgttttgttgcctttgaatgaacctgttcatggaactaagagaagatctcaaattcaaacttttttggatcatcatggaggacctggagttcaacatatggctttggcttctgatgatgttttgagaactttgagagaaatgcaagctagatctgctatgggaggatttgaatttatggctcctcctacttctgattattatgatggagttagaagaagagctggagatgttttgactgaagctcaaattaaggaatgtcaagaattgggagttttggttgatagagatgatcaaggagttttgttgcaaattgttcctaagcctgttggagatagacctactttgtttttggaaattattcaaagaattggatgtatggaaagagatgaaaagggacaagaatatcaaaagggaggatgtggaggatttggaaagggaaatttttctcaattgtttaagtctattgaagattatgaaaagtctttggaagctatgcaagctgctgctgctgctactgctcaaggatcttga

SEQ ID NO: 349 - protein, 445 aa, Artificial Sequence
  AtHPPDm-F372V Amino Acid Sequence
MGHQNAAVSENQNHDDGAASSPGFKLVGFSKFVRKNPKSDKFKVKRFHHIEFWCGDATNVARRFSWGLGMRFSAKSDLSTGNMVHASYLLTSGDLRFLFTAPYSPSLSAGEIKPTTTASIPSFDHGSCRSFFSSHGLGVRAVAIEVEDAESAFSISVANGAIPSSPPIVLNEAVTIAEVKLYGDVVLRYVSYKAEDTEKSEFLPGFERVEDASSFPLDYGIRRLDHAVGNVPELGPALTYVAGFTGFHQFAEFTADDVGTAESGLNSAVLASNDEMVLLPINEPVHGTKRKSQIQTYLEHNEGAGLQHLALMSEDIFRTLREMRKRSSIGGFDFMPSPPPTYYQNLKKRVGDVLSDDQIKECEELGILVDRDDQGTLLQIVTKPLGDRPTIFIEIIQRVGCMMKDEEGKAYQSGGCGGFGKGNFSELFKSIEEYEKTLEAKQLVG

SEQ ID NO: 350 - DNA, 1338 bp, Artificial Sequence
  AtHPPDm-F372V Nucleotide Sequence
atgggacatcaaaatgctgctgtttctgaaaatcaaaatcatgatgatggagctgcttcttctcctggatttaagttggttggattttctaagtttgttagaaagaatcctaagtctgataagtttaaggttaagagatttcatcatattgaattttggtgtggagatgctactaatgttgctagaagattttcttggggattgggaatgagattttctgctaagtctgatttgtctactggaaatatggttcatgcttcttatttgttgacttctggagatttgagatttttgtttactgctccttattctccttctttgtctgctggagaaattaagcctactactactgcttctattccttcttttgatcatggatcttgtagatcttttttttcttctcatggattgggagttagagctgttgctattgaagttgaagatgctgaatctgctttttctatttctgttgctaatggagctattccttcttctcctcctattgttttgaatgaagctgttactattgctgaagttaagttgtatggagatgttgttttgagatatgtttcttataaggctgaagatactgaaaagtctgaatttttgcctggatttgaaagagttgaagatgcttcttcttttcctttggattatggaattagaagattggatcatgctgttggaaatgttcctgaattgggacctgctttgacttatgttgctggatttactggatttcatcaatttgctgaatttactgctgatgatgttggaactgctgaatctggattgaattctgctgttttggcttctaatgatgaaatggttttgttgcctattaatgaacctgttcatggaactaagagaaagtctcaaattcaaacttatttggaacataatgaaggagctggattgcaacatttggctttgatgtctgaagatatttttagaactttgagagaaatgagaaagagatcttctattggaggatttgattttatgccttctcctcctcctacttattatcaaaatttgaagaagagagttggagatgttttgtctgatgatcaaattaaggaatgtgaagaattgggaattttggttgatagagatgatcaaggaactttgttgcaaattgttactaagcctttgggagatagacctactatttttattgaaattattcaaagagttggatgtatgatgaaggatgaagaaggaaaggcttatcaatctggaggatgtggaggatttggaaagggaaatttttctgaattgtttaagtctattgaagaatatgaaaagactttggaagctaagcaattggttggatga

SEQ ID NO: 351 - protein, 436 aa, Artificial Sequence
  GsHPPDm-F372V Amino Acid Sequence
MVQTNQSGSGNDFKLVGFSNFVRSNPKSDRFTVKRFHHIEFWCTDATNVARRFSWGLGMQFVAKSDLSTGNLTHASYLLRSRDLNFLFTAPYSPSIAVAQNLSPQSTASIPSFDHSLCRSFAATHGLGVRAIAIEVDDAETAFTTSVTHGALPFCPPTPLGDVATIAEVKLYGDVVLRYVSYTTTINSDHDFLPGFEKIEDTLSYPLDYGLRRLDHAVGNVPELGPAVSYVKSFTGFHEFAEFTAEDVGTSESGLNSVVLANNEEMVLLPMNEPVFGTKRKSQIQTYLEHNEGAGVQHLALVSEDIFKTLREMRKRSFVGGFEFMPSPPPTYYKKLKQRAGDILSDEQIKECEELGILVDRDDQGTLLQIVTKPVGDRPTIFIEIIQRIGCMVKDEEGKQYQKGGCGGFGKGNFSELFKSIEEYEKSLEAKQSQNP

SEQ ID NO: 352 - DNA, 1311 bp, Artificial Sequence
  GsHPPDm-F372V Nucleotide Sequence
atggttcaaactaatcaatctggatctggaaatgattttaagttggttggattttctaattttgttagatctaatcctaagtctgatagatttactgttaagagatttcatcatattgaattttggtgtactgatgctactaatgttgctagaagattttcttggggattgggaatgcaatttgttgctaagtctgatttgtctactggaaatttgactcatgcttcttatttgttgagatctagagatttgaattttttgtttactgctccttattctccttctattgctgttgctcaaaatttgtctcctcaatctactgcttctattccttcttttgatcattctttgtgtagatcttttgctgctactcatggattgggagttagagctattgctattgaagttgatgatgctgaaactgcttttactacttctgttactcatggagctttgcctttttgtcctcctactcctttgggagatgttgctactattgctgaagttaagttgtatggagatgttgttttgagatatgtttcttatactactactattaattctgatcatgattttttgcctggatttgaaaagattgaagatactttgtcttatcctttggattatggattgagaagattggatcatgctgttggaaatgttcctgaattgggacctgctgtttcttatgttaagtcttttactggatttcatgaatttgctgaatttactgctgaagatgttggaacttctgaatctggattgaattctgttgttttggctaataatgaagaaatggttttgttgcctatgaatgaacctgtttttggaactaagagaaagtctcaaattcaaacttatttggaacataatgaaggagctggagttcaacatttggctttggtttctgaagatatttttaagactttgagagaaatgagaaagagatcttttgttggaggatttgaatttatgccttctcctcctcctacttattataagaagttgaagcaaagagctggagatattttgtctgatgaacaaattaaggaatgtgaagaattgggaattttggttgatagagatgatcaaggaactttgttgcaaattgttactaagcctgttggagatagacctactatttttattgaaattattcaaagaattggatgtatggttaaggatgaagaaggaaagcaatatcaaaagggaggatgtggaggatttggaaagggaaatttttctgaattgtttaagtctattgaagaatatgaaaagtctttggaagctaagcaatctcaaaatccttga

SEQ ID NO: 353 - protein, 436 aa, Artificial Sequence
  TaHPPDm-F372V Amino Acid Sequence
MPPTPTTPAATGAGAAAAVTPEHARPRRMVRFNPRSDRFHTLSFHHVEFWCADAASAAGRFAFALGAPLAARSDLSTGNSVHASQLLRSGNLAFLFTAPYANGCDAATASLPSFSADAARRFSADHGLAVRSIALRVADAAEAFRASVDGGARPAFSPVDLGRGFGFAEVELYGDVVLRFVSHPDGTDVPFLPGFEGVSNPGAVDYGLTRFDHVVGNVPELASAAAYVAGFTGFHEFAEFTTEDVGTAESGLNSMVLANNSEGVLLPLNEPVHGTKRRSQIQTFLEHHGGPGVQHIAVASSDVLRTLREMRARSAMGGFDFLPPPLPKYYEGVRRIAGDVLSEAQIKECQELGVLVDRDDQGVLLQIVTKPVGDRPTLFLEMIQRIGCMEKDERGEEYQKGGCGGFGKGNFSELFKSIEDYEKSLEAKQSAAVQGS

SEQ ID NO: 354 - DNA, 1311 bp, Artificial Sequence
  TaHPPDm-F372V Nucleotide Sequence
atgcctcctactcctactactcctgctgctactggagctggagctgctgctgctgttactcctgaacatgctagacctagaagaatggttagatttaatcctagatctgatagatttcatactttgtcttttcatcatgttgaattttggtgtgctgatgctgcttctgctgctggaagatttgcttttgctttgggagctcctttggctgctagatctgatttgtctactggaaattctgttcatgcttctcaattgttgagatctggaaatttggcttttttgtttactgctccttatgctaatggatgtgatgctgctactgcttctttgccttctttttctgctgatgctgctagaagattttctgctgatcatggattggctgttagatctattgctttgagagttgctgatgctgctgaagcttttagagcttctgttgatggaggagctagacctgctttttctcctgttgatttgggaagaggatttggatttgctgaagttgaattgtatggagatgttgttttgagatttgtttctcatcctgatggaactgatgttccttttttgcctggatttgaaggagtttctaatcctggagctgttgattatggattgactagatttgatcatgttgttggaaatgttcctgaattggcttctgctgctgcttatgttgctggatttactggatttcatgaatttgctgaatttactactgaagatgttggaactgctgaatctggattgaattctatggttttggctaataattctgaaggagttttgttgcctttgaatgaacctgttcatggaactaagagaagatctcaaattcaaacttttttggaacatcatggaggacctggagttcaacatattgctgttgcttcttctgatgttttgagaactttgagagaaatgagagctagatctgctatgggaggatttgattttttgcctcctcctttgcctaagtattatgaaggagttagaagaattgctggagatgttttgtctgaagctcaaattaaggaatgtcaagaattgggagttttggttgatagagatgatcaaggagttttgttgcaaattgttactaagcctgttggagatagacctactttgtttttggaaatgattcaaagaattggatgtatggaaaaggatgaaagaggagaagaatatcaaaagggaggatgtggaggatttggaaagggaaatttttctgaattgtttaagtctattgaagattatgaaaagtctttggaagctaagcaatctgctgctgttcaaggatcttga

SEQ ID NO: 355 - protein, 436 aa, Artificial Sequence
  BdHPPDm-F372V Amino Acid Sequence
MPPPATTAAPAAAAVTPEHARPPRRVARVNPRSDRFSALSFHHVELWCADAASAAGRFSFALGAPPAARSDLSTGNSAHASILLRSGSLAFLFTAPYAPSPASDSAASIPSFSASAARQFTADHGGLAVRAVALRVSSASDAFHASVSAGARPSFPPADLGQGFALAEVELYGDVVLRFISHPDENTEIPFLPGFESVSNPGASTYGLTRFDHVVGNVPSLAPVAAYIAGFTGFHEFAEFTAEDVGTADSGLNSVVLANNSERVLLPLNEPVHGTKRRSQIQTYLDHHGGPGVQHIALASDDVLRTLREMRARSAMGGFEFLAPPPPNYYDGVRRRAGDVLSEAQIKECQELGVLVDRDDQGVLLQIVTKPVGDRPTLFLEMIQRIGCMEKDEIGQEQQKGGCGGFGKGNFSELFRSIEEYEKSLEAKQSAVVQES

SEQ ID NO: 356 - DNA, 1311 bp, Artificial Sequence
  BdHPPDm-F372V Nucleotide Sequence
atgcctcctcctgctactactgctgctcctgctgctgctgctgttactcctgaacatgctagacctcctagaagagttgctagagttaatcctagatctgatagattttctgctttgtcttttcatcatgttgaattgtggtgtgctgatgctgcttctgctgctggaagattttcttttgctttgggagctcctcctgctgctagatctgatttgtctactggaaattctgctcatgcttctattttgttgagatctggatctttggcttttttgtttactgctccttatgctccttctcctgcttctgattctgctgcttctattccttctttttctgcttctgctgctagacaatttactgctgatcatggaggattggctgttagagctgttgctttgagagtttcttctgcttctgatgcttttcatgcttctgtttctgctggagctagaccttcttttcctcctgctgatttgggacaaggatttgctttggctgaagttgaattgtatggagatgttgttttgagatttatttctcatcctgatgaaaatactgaaattccttttttgcctggatttgaatctgtttctaatcctggagcttctacttatggattgactagatttgatcatgttgttggaaatgttccttctttggctcctgttgctgcttatattgctggatttactggatttcatgaatttgctgaatttactgctgaagatgttggaactgctgattctggattgaattctgttgttttggctaataattctgaaagagttttgttgcctttgaatgaacctgttcatggaactaagagaagatctcaaattcaaacttatttggatcatcatggaggacctggagttcaacatattgctttggcttctgatgatgttttgagaactttgagagaaatgagagctagatctgctatgggaggatttgaatttttggctcctcctcctcctaattattatgatggagttagaagaagagctggagatgttttgtctgaagctcaaattaaggaatgtcaagaattgggagttttggttgatagagatgatcaaggagttttgttgcaaattgttactaagcctgttggagatagacctactttgtttttggaaatgattcaaagaattggatgtatggaaaaggatgaaattggacaagaacaacaaaagggaggatgtggaggatttggaaagggaaatttttctgaattgtttagatctattgaagaatatgaaaagtctttggaagctaagcaatctgctgttgttcaagaatcttga

SEQ ID NO: 357 - protein, 434 aa, Artificial Sequence
  HvHPPDm-F372V Amino Acid Sequence
MPPTPTTPAATGAAAAVTPEHARPHRMVRFNPRSDRFHTLSFHHVEFWCADAASAAGRFAFALGAPLAARSDLSTGNSAHASQLLRSGSLAFLFTAPYANGCDAATASLPSFSADAARRFSADHGIAVRSVALRVADAAEAFRASRRRGARPAFAPVDLGRGFAFAEVELYGDVVLRFVSHPDGTDVPFLPGFEGVTNPDAVDYGLTRFDHVVGNVPELAPAAAYIAGFTGFHEFAEFTAEDVGTTESGLNSVVLANNSEGVLLPLNEPVHGTKRRSQIQTFLEHHGGPGVQHIAVASSDVLRTLRKMRARSAMGGFDFLPPPLPKYYEGVRRLAGDVLSEAQIKECQELGVLVDRDDQGVLLQIVTKPVGDRPTLFLEMIQRIGCMEKDERGEEYQKGGCGGFGKGNFSELFKSIEDYEKSLEAKQSAAVQGS

SEQ ID NO: 358 - DNA, 1305 bp, Artificial Sequence
  HvHPPDm-F372V Nucleotide Sequence
atgcctcctactcctactactcctgctgctactggagctgctgctgctgttactcctgaacatgctagacctcatagaatggttagatttaatcctagatctgatagatttcatactttgtcttttcatcatgttgaattttggtgtgctgatgctgcttctgctgctggaagatttgcttttgctttgggagctcctttggctgctagatctgatttgtctactggaaattctgctcatgcttctcaattgttgagatctggatctttggcttttttgtttactgctccttatgctaatggatgtgatgctgctactgcttctttgccttctttttctgctgatgctgctagaagattttctgctgatcatggaattgctgttagatctgttgctttgagagttgctgatgctgctgaagcttttagagcttctagaagaagaggagctagacctgcttttgctcctgttgatttgggaagaggatttgcttttgctgaagttgaattgtatggagatgttgttttgagatttgtttctcatcctgatggaactgatgttccttttttgcctggatttgaaggagttactaatcctgatgctgttgattatggattgactagatttgatcatgttgttggaaatgttcctgaattggctcctgctgctgcttatattgctggatttactggatttcatgaatttgctgaatttactgctgaagatgttggaactactgaatctggattgaattctgttgttttggctaataattctgaaggagttttgttgcctttgaatgaacctgttcatggaactaagagaagatctcaaattcaaacttttttggaacatcatggaggacctggagttcaacatattgctgttgcttcttctgatgttttgagaactttgagaaagatgagagctagatctgctatgggaggatttgattttttgcctcctcctttgcctaagtattatgaaggagttagaagattggctggagatgttttgtctgaagctcaaattaaggaatgtcaagaattgggagttttggttgatagagatgatcaaggagttttgttgcaaattgttactaagcctgttggagatagacctactttgtttttggaaatgattcaaagaattggatgtatggaaaaggatgaaagaggagaagaatatcaaaagggaggatgtggaggatttggaaagggaaatttttctgaattgtttaagtctattgaagattatgaaaagtctttggaagctaagcaatctgctgctgttcaaggatcttga

SEQ ID NO: 359 - protein, 441 aa, Artificial Sequence
  SiHPPDm-F372V Amino Acid Sequence
MPPTPTPAAAAPGAAAAPAAGDQAAFRLVGHRGFVRVNPRSDRFHTLSFHHVELWCADATSAAGRFSFGLGAPLAARSDLSTGNSAHASLLLRSGSLAFLFTAPYAHGVDAATASLPSFSAPAARSFAADHGLAVRAIGLRVADAEDAFRASVAAGARPAFKPVELGLGFRLAEVELYGDVVLRYVSYPDAEDAPFLPGFENVNNPGALNYGLRRFDHIVGNVPELAPVAAYVAGFTGFHEFAEFTAEDVGTAESGLNSMVLANNSETVLIPLNEPVHGTKRRSQIQTFLDHNGGPGVQHIALASDDVLRTLREMQARSAMGGFEFMAAPPPDYYEGVRRRAGDVLSEAQIKECQELGVLVDRDDQGVLLQIVTKPVGDRQTLFLEIIQRIGCMEKDEQGQEYQKGGCGGFGKGNFSQLFKSIEDYEKSLESKQAAAVQGS

SEQ ID NO: 360 - DNA, 1326 bp, Artificial Sequence
  SiHPPDm-F372V Nucleotide Sequence
atgcctcctactcctactcctgctgctgctgctcctggagctgctgctgctcctgctgctggagatcaagctgcttttagattggttggacatagaggatttgttagagttaatcctagatctgatagatttcatactttgtcttttcatcatgttgaattgtggtgtgctgatgctacttctgctgctggaagattttcttttggattgggagctcctttggctgctagatctgatttgtctactggaaattctgctcatgcttctttgttgttgagatctggatctttggcttttttgtttactgctccttatgctcatggagttgatgctgctactgcttctttgccttctttttctgctcctgctgctagatcttttgctgctgatcatggattggctgttagagctattggattgagagttgctgatgctgaagatgcttttagagcttctgttgctgctggagctagacctgcttttaagcctgttgaattgggattgggatttagattggctgaagttgaattgtatggagatgttgttttgagatatgtttcttatcctgatgctgaagatgctccttttttgcctggatttgaaaatgttaataatcctggagctttgaattatggattgagaagatttgatcatattgttggaaatgttcctgaattggctcctgttgctgcttatgttgctggatttactggatttcatgaatttgctgaatttactgctgaagatgttggaactgctgaatctggattgaattctatggttttggctaataattctgaaactgttttgattcctttgaatgaacctgttcatggaactaagagaagatctcaaattcaaacttttttggatcataatggaggacctggagttcaacatattgctttggcttctgatgatgttttgagaactttgagagaaatgcaagctagatctgctatgggaggatttgaatttatggctgctcctcctcctgattattatgaaggagttagaagaagagctggagatgttttgtctgaagctcaaattaaggaatgtcaagaattgggagttttggttgatagagatgatcaaggagttttgttgcaaattgttactaagcctgttggagatagacaaactttgtttttggaaattattcaaagaattggatgtatggaaaaggatgaacaaggacaagaatatcaaaagggaggatgtggaggatttggaaagggaaatttttctcaattgtttaagtctattgaagattatgaaaagtctttggaatctaagcaagctgctgctgttcaaggatcttga

SEQ ID NO: 361 - protein, 440 aa, Artificial Sequence
  SbHPPDm-F372V Amino Acid Sequence
MPPTPTTAAATGAAVAAASAEQAAFRLVGHRNFVRVNPRSDRFHTLAFHHVELWCADAASAAGRFSFGLGAPLAARSDLSTGNTAHASLLLRSGALAFLFTAPYAHGADAATASLPSFSAAEARRFAADHGLAVRAVALRVADAEDAFRASVAAGARPAFEPVELGLGFRLAEVELYGDVVLRYVSYPDDADASFLPGFVGVTSPGAADYGLRRFDHIVGNVPELAPAAAYFAGFTGFHEFAEFTAEDVGTTESGLNSMVLANNAENVLLPLNEPVHGTKRRSQIQTYLDHHGGPGVQHMALASDDVLRTLREMQARSAMGGFEFMAPPAPEYYDGVRRRAGDVLTEAQIKECQELGVLVDRDDQGVLLQIVTKPVGDRPTLFLEIIQRIGCMEKDEKGQEYQKGGCGGFGKGNFSQLFKSIEDYEKSLEAKQAAAAQGS

SEQ ID NO: 362 - DNA, 1323 bp, Artificial Sequence
  SbHPPDm-F372V Nucleotide Sequence
atgcctcctactcctactactgctgctgctactggagctgctgttgctgctgcttctgctgaacaagctgcttttagattggttggacatagaaattttgttagagttaatcctagatctgatagatttcatactttggcttttcatcatgttgaattgtggtgtgctgatgctgcttctgctgctggaagattttcttttggattgggagctcctttggctgctagatctgatttgtctactggaaatactgctcatgcttctttgttgttgagatctggagctttggcttttttgtttactgctccttatgctcatggagctgatgctgctactgcttctttgccttctttttctgctgctgaagctagaagatttgctgctgatcatggattggctgttagagctgttgctttgagagttgctgatgctgaagatgcttttagagcttctgttgctgctggagctagacctgcttttgaacctgttgaattgggattgggatttagattggctgaagttgaattgtatggagatgttgttttgagatatgtttcttatcctgatgatgctgatgcttcttttttgcctggatttgttggagttacttctcctggagctgctgattatggattgagaagatttgatcatattgttggaaatgttcctgaattggctcctgctgctgcttattttgctggatttactggatttcatgaatttgctgaatttactgctgaagatgttggaactactgaatctggattgaattctatggttttggctaataatgctgaaaatgttttgttgcctttgaatgaacctgttcatggaactaagagaagatctcaaattcaaacttatttggatcatcatggaggacctggagttcaacatatggctttggcttctgatgatgttttgagaactttgagagaaatgcaagctagatctgctatgggaggatttgaatttatggctcctcctgctcctgaatattatgatggagttagaagaagagctggagatgttttgactgaagctcaaattaaggaatgtcaagaattgggagttttggttgatagagatgatcaaggagttttgttgcaaattgttactaagcctgttggagatagacctactttgtttttggaaattattcaaagaattggatgtatggaaaaggatgaaaagggacaagaatatcaaaagggaggatgtggaggatttggaaagggaaatttttctcaattgtttaagtctattgaagattatgaaaagtctttggaagctaagcaagctgctgctgctcaaggatcttga

SEQ ID NO: 363 - protein, 446 aa, Artificial Sequence
  OsHPPDm-F372V Amino Acid Sequence
MPPTPTPTATTGAVSAAAAAGENAGFRLVGHRRFVRANPRSDRFQALAFHHVELWCADAASAAGRFAFALGAPLAARSDLSTGNSAHASLLLRSASVAFLFTAPYGGDHGVGADAATTASIPSFSPGAARRFAADHGLAVHAVALRVADAADAFRASVAAGARPAFQPADLGGGFGLAEVELYGDVVLRFVSHPDGADAPFLPGFEGVSNPGAVDYGLRRFDHVVGNVPELAPVAAYISGFTGFHEFAEFTAEDVGTAESGLNSVVLANNAETVLLPLNEPVHGTKRRSQIQTYLDHHGGPGVQHIALASDDVLGTLREMRARSAMGGFEFLAPPPPNYYDGVRRRAGDVLSEEQINECQELGVLVDRDDQGVLLQIVTKPVGDRPTFFLEMIQRIGCMEKDESGQEYQKGGCGGFGKGNFSELFKSIEEYEKSLEAKQAPTVQGS

SEQ ID NO: 364 - DNA, 1341 bp, Artificial Sequence
  OsHPPDm-F372V Nucleotide Sequence
atgcctcctactcctactcctactgctactactggagctgtttctgctgctgctgctgctggagaaaatgctggatttagattggttggacatagaagatttgttagagctaatcctagatctgatagatttcaagctttggcttttcatcatgttgaattgtggtgtgctgatgctgcttctgctgctggaagatttgcttttgctttgggagctcctttggctgctagatctgatttgtctactggaaattctgctcatgcttctttgttgttgagatctgcttctgttgcttttttgtttactgctccttatggaggagatcatggagttggagctgatgctgctactactgcttctattccttctttttctcctggagctgctagaagatttgctgctgatcatggattggctgttcatgctgttgctttgagagttgctgatgctgctgatgcttttagagcttctgttgctgctggagctagacctgcttttcaacctgctgatttgggaggaggatttggattggctgaagttgaattgtatggagatgttgttttgagatttgtttctcatcctgatggagctgatgctccttttttgcctggatttgaaggagtttctaatcctggagctgttgattatggattgagaagatttgatcatgttgttggaaatgttcctgaattggctcctgttgctgcttatatttctggatttactggatttcatgaatttgctgaatttactgctgaagatgttggaactgctgaatctggattgaattctgttgttttggctaataatgctgaaactgttttgttgcctttgaatgaacctgttcatggaactaagagaagatctcaaattcaaacttatttggatcatcatggaggacctggagttcaacatattgctttggcttctgatgatgttttgggaactttgagagaaatgagagctagatctgctatgggaggatttgaatttttggctcctcctcctcctaattattatgatggagttagaagaagagctggagatgttttgtctgaagaacaaattaatgaatgtcaagaattgggagttttggttgatagagatgatcaaggagttttgttgcaaattgttactaagcctgttggagatagacctactttttttttggaaatgattcaaagaattggatgtatggaaaaggatgaatctggacaagaatatcaaaagggaggatgtggaggatttggaaagggaaatttttctgaattgtttaagtctattgaagaatatgaaaagtctttggaagctaagcaagctcctactgttcaaggatcttga

SEQ ID NO: 365 - protein, 488 aa, Artificial Sequence
  GmHPPDm-F372V Amino Acid Sequence
MPMYTPSLSAPSSNHIQPSVTLPLYITTTKLNLKQQHHTTPMPIPMCNEIQAQAQAQAQPGFKLVGFKNFVRTNPKSDRFQVNRFHHIEFWCTDATNASRRFSWGLGMPIVAKSDLSTGNQIHASYLLRSGDLSFLFSAPYSPSLSAGSSAASSASIPSFDAATCLAFAAKHGFGVRAIALEVADAEAAFSASVAKGAEPASPPVLVDDRTGFAEVRLYGDVVLRYVSYKDAAPQAPHADPSRWFLPGFEAAASSSSFPELDYGIRRLDHAVGNVPELAPAVRYLKGFSGFHEFAEFTAEDVGTSESGLNSVVLANNSETVLLPLNEPVYGTKRKSQIETYLEHNEGAGVQHLALVTHDIFTTLREMRKRSFLGGFEFMPSPPPTYYANLHNRAADVLTVDQIKQCEELGILVDRDDQGTLLQIVTKPVGDRPTIFIEIIQRIGCMVEDEEGKVYQKGACGGFGKGNFSELFKSIEEYEKTLEAKRTA

SEQ ID NO: 366 - DNA, 1467 bp, Artificial Sequence
  GmHPPDm-F372V Nucleotide Sequence
atgcctatgtatactccttctttgtctgctccttcttctaatcatattcaaccttctgttactttgcctttgtatattactactactaagttgaatttgaagcaacaacatcatactactcctatgcctattcctatgtgtaatgaaattcaagctcaagctcaagctcaagctcaacctggatttaagttggttggatttaagaattttgttagaactaatcctaagtctgatagatttcaagttaatagatttcatcatattgaattttggtgtactgatgctactaatgcttctagaagattttcttggggattgggaatgcctattgttgctaagtctgatttgtctactggaaatcaaattcatgcttcttatttgttgagatctggagatttgtcttttttgttttctgctccttattctccttctttgtctgctggatcttctgctgcttcttctgcttctattccttcttttgatgctgctacttgtttggcttttgctgctaagcatggatttggagttagagctattgctttggaagttgctgatgctgaagctgctttttctgcttctgttgctaagggagctgaacctgcttctcctcctgttttggttgatgatagaactggatttgctgaagttagattgtatggagatgttgttttgagatatgtttcttataaggatgctgctcctcaagctcctcatgctgatccttctagatggtttttgcctggatttgaagctgctgcttcttcttcttcttttcctgaattggattatggaattagaagattggatcatgctgttggaaatgttcctgaattggctcctgctgttagatatttgaagggattttctggatttcatgaatttgctgaatttactgctgaagatgttggaacttctgaatctggattgaattctgttgttttggctaataattctgaaactgttttgttgcctttgaatgaacctgtttatggaactaagagaaagtctcaaattgaaacttatttggaacataatgaaggagctggagttcaacatttggctttggttactcatgatatttttactactttgagagaaatgagaaagagatcttttttgggaggatttgaatttatgccttctcctcctcctacttattatgctaatttgcataatagagctgctgatgttttgactgttgatcaaattaagcaatgtgaagaattgggaattttggttgatagagatgatcaaggaactttgttgcaaattgttactaagcctgttggagatagacctactatttttattgaaattattcaaagaattggatgtatggttgaagatgaagaaggaaaggtttatcaaaagggagcttgtggaggatttggaaagggaaatttttctgaattgtttaagtctattgaagaatatgaaaagactttggaagctaagagaactgcttga

SEQ ID NO: 367 - protein, 434 aa, Artificial Sequence
  CaHPPDm-F372V Amino Acid Sequence
MGTIETQTGFKLVGFNNFVRTNPKSDRFKVKRFHHVEFWCPDATNTARRFSWGLGMPIVAKSDLSTGNQTHASYLLRSGDLNFLFTAAYSPSISLSAPHPTASIPSFSAPTSFAFSASHGLGVRAVAIEVDDAEFAYTTSVNHGAIPSSPPVVLDNRVKLAEVQLYGDVVLRYVSYNDPIETSNPNPNHWFLPGFEPVEETSSNQSIDFGIQRLDHAVGNVPELSSALNYVKQFTGFHEFAEFTAEDVGTSESGLNSTVLANNEETVLLPMNEPVYGTKRKSQIQTYLEHNEGAGLQHLALMSNDIFKTLREMRKRSGIGGFEFMPSPPPTYYSNLKKRVGDVLNDEQIKECEELGILVDKDDQGTLLQIVTKPVGDRPTIFIEIIQRVGCMLKDDEGKEYQKGGCGGFGKGNFSELFKSIEEYEKTLEIKRTA

SEQ ID NO: 368 - DNA, 1305 bp, Artificial Sequence
  CaHPPDm-F372V Nucleotide Sequence
atgggaactattgaaactcaaactggatttaagttggttggatttaataattttgttagaactaatcctaagtctgatagatttaaggttaagagatttcatcatgttgaattttggtgtcctgatgctactaatactgctagaagattttcttggggattgggaatgcctattgttgctaagtctgatttgtctactggaaatcaaactcatgcttcttatttgttgagatctggagatttgaattttttgtttactgctgcttattctccttctatttctttgtctgctcctcatcctactgcttctattccttctttttctgctcctacttcttttgctttttctgcttctcatggattgggagttagagctgttgctattgaagttgatgatgctgaatttgcttatactacttctgttaatcatggagctattccttcttctcctcctgttgttttggataatagagttaagttggctgaagttcaattgtatggagatgttgttttgagatatgtttcttataatgatcctattgaaacttctaatcctaatcctaatcattggtttttgcctggatttgaacctgttgaagaaacttcttctaatcaatctattgattttggaattcaaagattggatcatgctgttggaaatgttcctgaattgtcttctgctttgaattatgttaagcaatttactggatttcatgaatttgctgaatttactgctgaagatgttggaacttctgaatctggattgaattctactgttttggctaataatgaagaaactgttttgttgcctatgaatgaacctgtttatggaactaagagaaagtctcaaattcaaacttatttggaacataatgaaggagctggattgcaacatttggctttgatgtctaatgatatttttaagactttgagagaaatgagaaagagatctggaattggaggatttgaatttatgccttctcctcctcctacttattattctaatttgaagaagagagttggagatgttttgaatgatgaacaaattaaggaatgtgaagaattgggaattttggttgataaggatgatcaaggaactttgttgcaaattgttactaagcctgttggagatagacctactatttttattgaaattattcaaagagttggatgtatgttgaaggatgatgaaggaaaggaatatcaaaagggaggatgtggaggatttggaaagggaaatttttctgaattgtttaagtctattgaagaatatgaaaagactttggaaattaagagaactgcttga

SEQ ID NO: 369 - protein, 440 aa, Artificial Sequence
  BnHPPDm-F372V Amino Acid Sequence
MGHENAAVCETQQHDDAASPGFKLVGFSKFVRKNPKSDKFKVKRFHHIEFWCGDATNVSRRFSWGLGMRFSAKSDLSTGNMVHASYLLTSGDLRFLFTAPYSPSLSAGEAQPSATASIPSFDHASCRSFFSSHGLGVRAVAIEVEDAESAFSISVANGAVPSSPPNVLNGAVTIAEVKLYGDVVLRYVSYYNGTVSFLPGFESVDDTSSFPLDYGIRRLDHAVGNVPELGPALTYLAGFTGFHQFAEFTADDVGTAESGLNSAVLANNDEMVLLPINEPVHGTKRKSQIQTFLEHNEGAGLQHLALMSEDIFRTLREMRKRSGVGGFDFMPSPPPTYYKNLKKRVGDVLSEEQIEECEELGILVDRDDQGTLLQIVTKPLGDRPTIFIEIIQRVGCMKRDEEGKVYQSGGCGGFGKGNFSELFKSIEEYEKTLEAKQLVG

SEQ ID NO: 370 - DNA, 1323 bp, Artificial Sequence
  BnHPPDm-F372V Nucleotide Sequence
atgggacatgaaaatgctgctgtttgtgaaactcaacaacatgatgatgctgcttctcctggatttaagttggttggattttctaagtttgttagaaagaatcctaagtctgataagtttaaggttaagagatttcatcatattgaattttggtgtggagatgctactaatgtttctagaagattttcttggggattgggaatgagattttctgctaagtctgatttgtctactggaaatatggttcatgcttcttatttgttgacttctggagatttgagatttttgtttactgctccttattctccttctttgtctgctggagaagctcaaccttctgctactgcttctattccttcttttgatcatgcttcttgtagatcttttttttcttctcatggattgggagttagagctgttgctattgaagttgaagatgctgaatctgctttttctatttctgttgctaatggagctgttccttcttctcctcctaatgttttgaatggagctgttactattgctgaagttaagttgtatggagatgttgttttgagatatgtttcttattataatggaactgtttcttttttgcctggatttgaatctgttgatgatacttcttcttttcctttggattatggaattagaagattggatcatgctgttggaaatgttcctgaattgggacctgctttgacttatttggctggatttactggatttcatcaatttgctgaatttactgctgatgatgttggaactgctgaatctggattgaattctgctgttttggctaataatgatgaaatggttttgttgcctattaatgaacctgttcatggaactaagagaaagtctcaaattcaaacttttttggaacataatgaaggagctggattgcaacatttggctttgatgtctgaagatatttttagaactttgagagaaatgagaaagagatctggagttggaggatttgattttatgccttctcctcctcctacttattataagaatttgaagaagagagttggagatgttttgtctgaagaacaaattgaagaatgtgaagaattgggaattttggttgatagagatgatcaaggaactttgttgcaaattgttactaagcctttgggagatagacctactatttttattgaaattattcaaagagttggatgtatgaagagagatgaagaaggaaaggtttatcaatctggaggatgtggaggatttggaaagggaaatttttctgaattgtttaagtctattgaagaatatgaaaagactttggaagctaagcaattggttggatga

SEQ ID NO: 371 - protein, 450 aa, Artificial Sequence
  HaHPPDm-F372V Amino Acid Sequence
MGTEATVAAVVAGDESDHPTSAFKLVGFKNFIRTNPMSDKFTVKNFHHIEFWCSDATNTARRFSWGLGMPIIFKSDLSTGNSTHASYLLRSGHLNFLFTAPYSPSISPTTTTASIPTFSHSASRHFTATHGLAVRAIAVEVEDAETAFAVSVANGAKPSSPPVTLGHNDVVLSEVKLYGDVVLRYVSYKNNTNNNNNNDNDNYIFLPGFEAMDKTSSFQELDYGIRRLDHAVGNVPELAPAVDYVKSFTGFHEFAEFTAEDVGTSESGLNSVVLACNSEMVLIPMNEPVYGTKRKSQIQTYLEHNEGAGVQHLALASEDIFRTLREMRKRSGVGGFEFMPSPPPTYYRNLKSRAGDVLSDEQIKECEELGILVDRDDQGTLLQIVTKPVGDRPTIFIEIIQRVGCMVKDDEGKVQQKAGCGGFGKGNFSELFKSIEEYEKTLEARSTTAA

SEQ ID NO: 372 - DNA, 1353 bp, Artificial Sequence
  HaHPPDm-F372V Nucleotide Sequence
atgggaactgaagctactgttgctgctgttgttgctggagatgaatctgatcatcctacttctgcttttaagttggttggatttaagaattttattagaactaatcctatgtctgataagtttactgttaagaattttcatcatattgaattttggtgttctgatgctactaatactgctagaagattttcttggggattgggaatgcctattatttttaagtctgatttgtctactggaaattctactcatgcttcttatttgttgagatctggacatttgaattttttgtttactgctccttattctccttctatttctcctactactactactgcttctattcctactttttctcattctgcttctagacattttactgctactcatggattggctgttagagctattgctgttgaagttgaagatgctgaaactgcttttgctgtttctgttgctaatggagctaagccttcttctcctcctgttactttgggacataatgatgttgttttgtctgaagttaagttgtatggagatgttgttttgagatatgtttcttataagaataatactaataataataataataatgataatgataattatatttttttgcctggatttgaagctatggataagacttcttcttttcaagaattggattatggaattagaagattggatcatgctgttggaaatgttcctgaattggctcctgctgttgattatgttaagtcttttactggatttcatgaatttgctgaatttactgctgaagatgttggaacttctgaatctggattgaattctgttgttttggcttgtaattctgaaatggttttgattcctatgaatgaacctgtttatggaactaagagaaagtctcaaattcaaacttatttggaacataatgaaggagctggagttcaacatttggctttggcttctgaagatatttttagaactttgagagaaatgagaaagagatctggagttggaggatttgaatttatgccttctcctcctcctacttattatagaaatttgaagtctagagctggagatgttttgtctgatgaacaaattaaggaatgtgaagaattgggaattttggttgatagagatgatcaaggaactttgttgcaaattgttactaagcctgttggagatagacctactatttttattgaaattattcaaagagttggatgtatggttaaggatgatgaaggaaaggttcaacaaaaggctggatgtggaggatttggaaagggaaatttttctgaattgtttaagtctattgaagaatatgaaaagactttggaagctagatctactactgctgcttga

SEQ ID NO: 373 - protein, 435 aa, Artificial Sequence
  MsHPPDm-F372V Amino Acid Sequence
MAIETETQTQTGFKLVGFKNFVRANPKSDRFKVKRFHHVEFWCTDATNTARRFSHGLGMPIVAKSDLSTGNQTHASYLLRSGDLNFLFSAAYSPSISLSSPSSTAAIPTFSASNCFSFSASHGLAVRAVAVEVEDAELAFTTSVNNGAIPSSPPVILENHVKLAEVRLYGDVVLRYVSYNDPNPNQNPNLLFLPGFERVSDESSNSSLDFGIRRLDHAVGNVPELSSAVKYVKDFTGFHEFAEFTAEDVGTSESGLNSVVLANNEETVLLPMNEPVYGTKRKSQIETYLEHNEGAGLQHLALKSEDIFRTLREMRKRSGVGGFEFMPSPPVTYYRNLKNRVGDVLSDEQIKECEELGILVDRDDQGTLLQIVTKPIGDRPTIFIEIIQRVGCMLKDEEGKEYQKGGCGGFGKGNFSELFKSIEEYEKTLETRRTA

SEQ ID NO: 374 - DNA, 1308 bp, Artificial Sequence
  MsHPPDm-F372V Nucleotide Sequence
atggctattgaaactgaaactcaaactcaaactggatttaagttggttggatttaagaattttgttagagctaatcctaagtctgatagatttaaggttaagagatttcatcatgttgaattttggtgtactgatgctactaatactgctagaagattttctcatggattgggaatgcctattgttgctaagtctgatttgtctactggaaatcaaactcatgcttcttatttgttgagatctggagatttgaattttttgttttctgctgcttattctccttctatttctttgtcttctccttcttctactgctgctattcctactttttctgcttctaattgtttttctttttctgcttctcatggattggctgttagagctgttgctgttgaagttgaagatgctgaattggcttttactacttctgttaataatggagctattccttcttctcctcctgttattttggaaaatcatgttaagttggctgaagttagattgtatggagatgttgttttgagatatgtttcttataatgatcctaatcctaatcaaaatcctaatttgttgtttttgcctggatttgaaagagtttctgatgaatcttctaattcttctttggattttggaattagaagattggatcatgctgttggaaatgttcctgaattgtcttctgctgttaagtatgttaaggattttactggatttcatgaatttgctgaatttactgctgaagatgttggaacttctgaatctggattgaattctgttgttttggctaataatgaagaaactgttttgttgcctatgaatgaacctgtttatggaactaagagaaagtctcaaattgaaacttatttggaacataatgaaggagctggattgcaacatttggctttgaagtctgaagatatttttagaactttgagagaaatgagaaagagatctggagttggaggatttgaatttatgccttctcctcctgttacttattatagaaatttgaagaatagagttggagatgttttgtctgatgaacaaattaaggaatgtgaagaattgggaattttggttgatagagatgatcaaggaactttgttgcaaattgttactaagcctattggagatagacctactatttttattgaaattattcaaagagttggatgtatgttgaaggatgaagaaggaaaggaatatcaaaagggaggatgtggaggatttggaaagggaaatttttctgaattgtttaagtctattgaagaatatgaaaagactttggaaactagaagaactgcttga

SEQ ID NO: 375 - protein, 434 aa, Artificial Sequence
  BvHPPDm-F372V Amino Acid Sequence
MGTLSPQPQTSPSQFKLVGYSNFIRVNPLSDLFPVKRFHHVEFWCGDATNVSRRFSWGLGMPIVAKSDLSTGNSVHASYLLRSGELHFLFTSPYSPSLSSPSSATIPTFSFSLFTSFLTSHGLAVRAVAVEVQDAEAAFHISVSNGASPVSPPIRLHDGVVLSEVHLYGDVVLRYVSTSSVVDGIFLPGFEEMLGESSFQELDFGLRRLDHAVGNVPELAPAIEYVKKFTGFHEFAEFTTEDVGTSESGLNSAVVANNDETVLFPMNEPVYGTKRKSQIQTYLEHNEGAGVQHLALMSEDIFWTLREMRKRSGLGGFEFMPSPPPTYYRNLRNRAADVLSEEQMKECEELGILVDKDDQGTLLQIVTKPIGDRPTMFIEIIQRIGCMMKDEEGKVYQKGGCGGFGKGNFSELFKSIEEYEKTLERKPIADTNAT

SEQ ID NO: 376 - DNA, 1305 bp, Artificial Sequence
  BvHPPDm-F372V Nucleotide Sequence
atgggaactttgtctcctcaacctcaaacttctccttctcaatttaagttggttggatattctaattttattagagttaatcctttgtctgatttgtttcctgttaagagatttcatcatgttgaattttggtgtggagatgctactaatgtttctagaagattttcttggggattgggaatgcctattgttgctaagtctgatttgtctactggaaattctgttcatgcttcttatttgttgagatctggagaattgcattttttgtttacttctccttattctccttctttgtcttctccttcttctgctactattcctactttttctttttctttgtttacttcttttttgacttctcatggattggctgttagagctgttgctgttgaagttcaagatgctgaagctgcttttcatatttctgtttctaatggagcttctcctgtttctcctcctattagattgcatgatggagttgttttgtctgaagttcatttgtatggagatgttgttttgagatatgtttctacttcttctgttgttgatggaatttttttgcctggatttgaagaaatgttgggagaatcttcttttcaagaattggattttggattgagaagattggatcatgctgttggaaatgttcctgaattggctcctgctattgaatatgttaagaagtttactggatttcatgaatttgctgaatttactactgaagatgttggaacttctgaatctggattgaattctgctgttgttgctaataatgatgaaactgttttgtttcctatgaatgaacctgtttatggaactaagagaaagtctcaaattcaaacttatttggaacataatgaaggagctggagttcaacatttggctttgatgtctgaagatattttttggactttgagagaaatgagaaagagatctggattgggaggatttgaatttatgccttctcctcctcctacttattatagaaatttgagaaatagagctgctgatgttttgtctgaagaacaaatgaaggaatgtgaagaattgggaattttggttgataaggatgatcaaggaactttgttgcaaattgttactaagcctattggagatagacctactatgtttattgaaattattcaaagaattggatgtatgatgaaggatgaagaaggaaaggtttatcaaaagggaggatgtggaggatttggaaagggaaatttttctgaattgtttaagtctattgaagaatatgaaaagactttggaaagaaagcctattgctgatactaatgctacttga

SEQ ID NO: 377 - protein, 447 aa, Artificial Sequence
  NtHPPDm-F372V Amino Acid Sequence
MGKLETVTTTSAAAADDSSELTTNFKLVGFKNFIRTNPRSDFFSVKSFHHIEFWCGDATNTARRFSWSLGMPIAAKSDLSTGNSVHASYLLRPVSGSLQFLFTAPYSPSISTPSSAAIPSFSTSTHRSFTTTHGLGVRAVALEVENAYTAFSASVSRGAKPMFEPVTIDEQVAMAEVHLYGDVVLRFVSYLKDADNLVFLPGFEAMDETASYKELDYGIRRLDHAVGNVPELGPVVDYIKRFTGFHEFAEFTAEDVGTAESGLNSMVLANNDETVLLPLNEPVYGTKRKSQIQTYLEHNEGAGVQHLALVTEDIFKTLTEMRKRSGVGGFEFMPSPPPTYYKNLKNRAGDVLSDEQILACEELGILVDRDDQGTLLQIVTKPVGDRPTIFIEIIQRIGCMLKDGKGQVYQKGGCGGFGKGNFSELFRSIEEYEKTLEAKQANQVAAA

SEQ ID NO: 378 - DNA, 1344 bp, Artificial Sequence
  NtHPPDm-F372V Nucleotide Sequence
atgggaaagttggaaactgttactactacttctgctgctgctgctgatgattcttctgaattgactactaattttaagttggttggatttaagaattttattagaactaatcctagatctgattttttttctgttaagtcttttcatcatattgaattttggtgtggagatgctactaatactgctagaagattttcttggtctttgggaatgcctattgctgctaagtctgatttgtctactggaaattctgttcatgcttcttatttgttgagacctgtttctggatctttgcaatttttgtttactgctccttattctccttctatttctactccttcttctgctgctattccttctttttctacttctactcatagatcttttactactactcatggattgggagttagagctgttgctttggaagttgaaaatgcttatactgctttttctgcttctgtttctagaggagctaagcctatgtttgaacctgttactattgatgaacaagttgctatggctgaagttcatttgtatggagatgttgttttgagatttgtttcttatttgaaggatgctgataatttggtttttttgcctggatttgaagctatggatgaaactgcttcttataaggaattggattatggaattagaagattggatcatgctgttggaaatgttcctgaattgggacctgttgttgattatattaagagatttactggatttcatgaatttgctgaatttactgctgaagatgttggaactgctgaatctggattgaattctatggttttggctaataatgatgaaactgttttgttgcctttgaatgaacctgtttatggaactaagagaaagtctcaaattcaaacttatttggaacataatgaaggagctggagttcaacatttggctttggttactgaagatatttttaagactttgactgaaatgagaaagagatctggagttggaggatttgaatttatgccttctcctcctcctacttattataagaatttgaagaatagagctggagatgttttgtctgatgaacaaattttggcttgtgaagaattgggaattttggttgatagagatgatcaaggaactttgttgcaaattgttactaagcctgttggagatagacctactatttttattgaaattattcaaagaattggatgtatgttgaaggatggaaagggacaagtttatcaaaagggaggatgtggaggatttggaaagggaaatttttctgaattgtttagatctattgaagaatatgaaaagactttggaagctaagcaagctaatcaagttgctgctgcttga

SEQ ID NO: 379 - protein, 455 aa, Artificial Sequence
  CsHPPDm-F372V Amino Acid Sequence
MGKEADFPRAPSEATDGGATASQSEFELQGFDNFIRTNPKSDRFKVKRFHHIEFWCTDATNVARRFSWGLGMQIVAKSDLSTGNMTHASYLLRSGHLCFLFTAPYSPSIAAAQNLTPASTASIPSFDHSVCRSFSGTHGFGARAIALEVEDAEIAFRTSVAHGAKPSCPPIVLENRAVLSEVHLYGDVVLRYISYKNPVSGDNGENKPDEWFLPKFEAMEETASFPLDFGIRRLDHAVGNVPELGPAVSYLKGFTGFHEFAEFTAEDVGTSESGLNSMVLANNEEMVLLPINEPVFGTKRKSQIQTYLEHNEGAGVQHLALMSEDIFRTLREMRKRSSVGGFEFMPSPPPTYYKNLKSRAGDVLTDEQIKECEELGILVDKDDQGTLLQIVTKPVGDRPTIFIEIIQRLGCMMKDEEGKAFQKGGCGGFGKGNFSELFKSIEEYEKTLEAKRVSE

SEQ ID NO: 380 - DNA, 1368 bp, Artificial Sequence
  CsHPPDm-F372V Nucleotide Sequence
atgggaaaggaagctgattttcctagagctccttctgaagctactgatggaggagctactgcttctcaatctgaatttgaattgcaaggatttgataattttattagaactaatcctaagtctgatagatttaaggttaagagatttcatcatattgaattttggtgtactgatgctactaatgttgctagaagattttcttggggattgggaatgcaaattgttgctaagtctgatttgtctactggaaatatgactcatgcttcttatttgttgagatctggacatttgtgttttttgtttactgctccttattctccttctattgctgctgctcaaaatttgactcctgcttctactgcttctattccttcttttgatcattctgtttgtagatctttttctggaactcatggatttggagctagagctattgctttggaagttgaagatgctgaaattgcttttagaacttctgttgctcatggagctaagccttcttgtcctcctattgttttggaaaatagagctgttttgtctgaagttcatttgtatggagatgttgttttgagatatatttcttataagaatcctgtttctggagataatggagaaaataagcctgatgaatggtttttgcctaagtttgaagctatggaagaaactgcttcttttcctttggattttggaattagaagattggatcatgctgttggaaatgttcctgaattgggacctgctgtttcttatttgaagggatttactggatttcatgaatttgctgaatttactgctgaagatgttggaacttctgaatctggattgaattctatggttttggctaataatgaagaaatggttttgttgcctattaatgaacctgtttttggaactaagagaaagtctcaaattcaaacttatttggaacataatgaaggagctggagttcaacatttggctttgatgtctgaagatatttttagaactttgagagaaatgagaaagagatcttctgttggaggatttgaatttatgccttctcctcctcctacttattataagaatttgaagtctagagctggagatgttttgactgatgaacaaattaaggaatgtgaagaattgggaattttggttgataaggatgatcaaggaactttgttgcaaattgttactaagcctgttggagatagacctactatttttattgaaattattcaaagattgggatgtatgatgaaggatgaagaaggaaaggcttttcaaaagggaggatgtggaggatttggaaagggaaatttttctgaattgtttaagtctattgaagaatatgaaaagactttggaagctaagagagtttctgaatga

SEQ ID NO: 381 - protein, 447 aa, Artificial Sequence
  StHPPDm-F372V Amino Acid Sequence
MGKQAATATATATATADDQQLPADIEDKYKLVGFNNFVRTNPRSDLFNVKRFHHIEFWCGDATNTARRFSWGLGLPIAAKSDLSTGNSVHASYLLRSSSSQLQFLFTAPYSPAISTPSSSSIPTFSVSSHRSFTETHGLGVRAIALEVENSRLAFSTCVSHGAKPVSEPVILNDEVVISEVHLYGDVVLRFVSFLKDSNRFVFLPGFELVEGAQLDYGIRRLDHAVGNVPQLGPVVEYIKSFTGFHEFAEFTAEDVGTAESGLNSVVLANNDETVLFPLNEPVYGTKRKSQIQTYLEHNEGAGVQHLALVTEDIFRTLREMRKRSGIGGFEFMPSPPPTYYKNLKSRAGDILSDEQIKECEELGILVDRDDQGTLLQIVTKPVGDRPTIFLEIIQRIGCMLQNAEGELYQKGGCGGFGKGNFSELFKSIEEYEKTLEAKQNTQVAIA

SEQ ID NO: 382 - DNA, 1344 bp, Artificial Sequence
  StHPPDm-F372V Nucleotide Sequence
atgggaaagcaagctgctactgctactgctactgctactgctactgctgatgatcaacaattgcctgctgatattgaagataagtataagttggttggatttaataattttgttagaactaatcctagatctgatttgtttaatgttaagagatttcatcatattgaattttggtgtggagatgctactaatactgctagaagattttcttggggattgggattgcctattgctgctaagtctgatttgtctactggaaattctgttcatgcttcttatttgttgagatcttcttcttctcaattgcaatttttgtttactgctccttattctcctgctatttctactccttcttcttcttctattcctactttttctgtttcttctcatagatcttttactgaaactcatggattgggagttagagctattgctttggaagttgaaaattctagattggctttttctacttgtgtttctcatggagctaagcctgtttctgaacctgttattttgaatgatgaagttgttatttctgaagttcatttgtatggagatgttgttttgagatttgtttcttttttgaaggattctaatagatttgtttttttgcctggatttgaattggttgaaggagctcaattggattatggaattagaagattggatcatgctgttggaaatgttcctcaattgggacctgttgttgaatatattaagtcttttactggatttcatgaatttgctgaatttactgctgaagatgttggaactgctgaatctggattgaattctgttgttttggctaataatgatgaaactgttttgtttcctttgaatgaacctgtttatggaactaagagaaagtctcaaattcaaacttatttggaacataatgaaggagctggagttcaacatttggctttggttactgaagatatttttagaactttgagagaaatgagaaagagatctggaattggaggatttgaatttatgccttctcctcctcctacttattataagaatttgaagtctagagctggagatattttgtctgatgaacaaattaaggaatgtgaagaattgggaattttggttgatagagatgatcaaggaactttgttgcaaattgttactaagcctgttggagatagacctactatttttttggaaattattcaaagaattggatgtatgttgcaaaatgctgaaggagaattgtatcaaaagggaggatgtggaggatttggaaagggaaatttttctgaattgtttaagtctattgaagaatatgaaaagactttggaagctaagcaaaatactcaagttgctattgcttga

SEQ ID NO: 383 - protein, 441 aa, Artificial Sequence
  SlHPPDm-F372V Amino Acid Sequence
MGKQAAAAADDQQLPGDIEDKFKLVGFNHFVRTNPRSDFFTVKRFHHIEFWCGDATNTARRFSWGLGLPIAAISDLSTGNSVHASYLLRSSSSSQLQFLFTAPYSSAISTSSSASIPTFSVSSHRSFTATHGLGVRAIALEVENSRLAFSTCVAHGAKPVSEPVILNDEVVIAEVHLYGDVVLRFVSFLKDSNCFVFLPGFESVEGAQLDYGIRRLDHAVGNVPELGPVVEYIKSFTGFHEFAEFTAEDVGTAESGLNSVVLANNDETVLFPLNEPVYGTKRKSQIQTYLEHNEGAGVQHLALVTEDIFRTLREMRKRSGIGGFEFMPSPPPTYYKNLKTRAGDILSDEQIQECEELGILVDRDDQGTLLQIVTKPVGDRPTIFLEIIQRIGCMLKNEEGELYQKGGCGGFGKGNFSELFKSIEEYEKTLEAKQNTQVAIA

SEQ ID NO: 384 - DNA, 1326 bp, Artificial Sequence
  SlHPPDm-F372V Nucleotide Sequence
atgggaaagcaagctgctgctgctgctgatgatcaacaattgcctggagatattgaagataagtttaagttggttggatttaatcattttgttagaactaatcctagatctgatttttttactgttaagagatttcatcatattgaattttggtgtggagatgctactaatactgctagaagattttcttggggattgggattgcctattgctgctatttctgatttgtctactggaaattctgttcatgcttcttatttgttgagatcttcttcttcttctcaattgcaatttttgtttactgctccttattcttctgctatttctacttcttcttctgcttctattcctactttttctgtttcttctcatagatcttttactgctactcatggattgggagttagagctattgctttggaagttgaaaattctagattggctttttctacttgtgttgctcatggagctaagcctgtttctgaacctgttattttgaatgatgaagttgttattgctgaagttcatttgtatggagatgttgttttgagatttgtttcttttttgaaggattctaattgttttgtttttttgcctggatttgaatctgttgaaggagctcaattggattatggaattagaagattggatcatgctgttggaaatgttcctgaattgggacctgttgttgaatatattaagtcttttactggatttcatgaatttgctgaatttactgctgaagatgttggaactgctgaatctggattgaattctgttgttttggctaataatgatgaaactgttttgtttcctttgaatgaacctgtttatggaactaagagaaagtctcaaattcaaacttatttggaacataatgaaggagctggagttcaacatttggctttggttactgaagatatttttagaactttgagagaaatgagaaagagatctggaattggaggatttgaatttatgccttctcctcctcctacttattataagaatttgaagactagagctggagatattttgtctgatgaacaaattcaagaatgtgaagaattgggaattttggttgatagagatgatcaaggaactttgttgcaaattgttactaagcctgttggagatagacctactatttttttggaaattattcaaagaattggatgtatgttgaagaatgaagaaggagaattgtatcaaaagggaggatgtggaggatttggaaagggaaatttttctgaattgtttaagtctattgaagaatatgaaaagactttggaagctaagcaaaatactcaagttgctattgcttga

SEQ ID NO: 385 - protein, 504 aa, Artificial Sequence
  AhHPPDm-F372V Amino Acid Sequence
MATAYTYAHAVTYCNSQHNPPIIPILSTNQHPPRVTLPSSIPHFISTITTFNLKHFPSHSLHTVMVTQTQQNAPSSSPELGFKLVGFKNFVRTNPKSDRFKVIRFHHVEFWCTDATNTASRFSWGLGMPIVAKSDLSTGNAVHASYLLRSGDLNFLFSAPYSASIAGDGASASFPSFSASDCHSFAAKHGLAVRAVAIEVEDASAAFSASVANGAKPVSPAVLLDNSVGFAEVHLYGDVVLRYISYSAPTRESNLNPTLRFLPGFEAVEADSSFPELDYGIRRLDHAVGNVPELAPAVNYLKKFTGFHEFAEFTAEDVGTSESGLNSVVLASNDEMVLLPLNEPVYGTKRKSQIETYLEHNEGAGLQHLALVSEDIFRTLREMRKRSTIGGFQFMPSPPPTYYRNLKKRAGDVLSDEQIKECEELGILVDRDDQGTLLQIVTKPVGDRPTIFIEIIQRIGCMLKDEEGKVYQKGGCGGFGKGNFSELFKSIEEYEKTLESRRTA

SEQ ID NO: 386 - DNA, 1515 bp, Artificial Sequence
  AhHPPDm-F372V Nucleotide Sequence
atggctactgcttatacttatgctcatgctgttacttattgtaattctcaacataatcctcctattattcctattttgtctactaatcaacatcctcctagagttactttgccttcttctattcctcattttatttctactattactacttttaatttgaagcattttccttctcattctttgcatactgttatggttactcaaactcaacaaaatgctccttcttcttctcctgaattgggatttaagttggttggatttaagaattttgttagaactaatcctaagtctgatagatttaaggttattagatttcatcatgttgaattttggtgtactgatgctactaatactgcttctagattttcttggggattgggaatgcctattgttgctaagtctgatttgtctactggaaatgctgttcatgcttcttatttgttgagatctggagatttgaattttttgttttctgctccttattctgcttctattgctggagatggagcttctgcttcttttccttctttttctgcttctgattgtcattcttttgctgctaagcatggattggctgttagagctgttgctattgaagttgaagatgcttctgctgctttttctgcttctgttgctaatggagctaagcctgtttctcctgctgttttgttggataattctgttggatttgctgaagttcatttgtatggagatgttgttttgagatatatttcttattctgctcctactagagaatctaatttgaatcctactttgagatttttgcctggatttgaagctgttgaagctgattcttcttttcctgaattggattatggaattagaagattggatcatgctgttggaaatgttcctgaattggctcctgctgttaattatttgaagaagtttactggatttcatgaatttgctgaatttactgctgaagatgttggaacttctgaatctggattgaattctgttgttttggcttctaatgatgaaatggttttgttgcctttgaatgaacctgtttatggaactaagagaaagtctcaaattgaaacttatttggaacataatgaaggagctggattgcaacatttggctttggtttctgaagatatttttagaactttgagagaaatgagaaagagatctactattggaggatttcaatttatgccttctcctcctcctacttattatagaaatttgaagaagagagctggagatgttttgtctgatgaacaaattaaggaatgtgaagaattgggaattttggttgatagagatgatcaaggaactttgttgcaaattgttactaagcctgttggagatagacctactatttttattgaaattattcaaagaattggatgtatgttgaaggatgaagaaggaaaggtttatcaaaagggaggatgtggaggatttggaaagggaaatttttctgaattgtttaagtctattgaagaatatgaaaagactttggaatctagaagaactgcttga

SEQ ID NO: 387 - protein, 339 aa, Artificial Sequence
  CyHPPDm-F372V Amino Acid Sequence
MEFDYLHLYVDDYQSAHRCYQRQWGFTCVNKIITDQGITGIYQQGQILLLISASESSLSRYADYLQKHPPGVGEVAWQVANWQKIQHQLSELQIETTPVIHPLTKAEGLTFLLWGDVHHSIYPVRSELNQNKTLHGVGLTTIDHVVLNIAADQFTQASQWYQQVFGWSVQQSFTVNTPHSGLYSEALASANGKVQFNLNCPTNNSSQIQTFLANNHGAGIQHVAFSTTSITRTVAHLRERGVNFLKIPTGYYQQQRNSSYFNYASLDWDTLQCLEILLDDQDNTGERLLLQIVSQPCYGVGTLFWEIIERRHRAKGFGQGNFQALYEAVETLEKQLEVP

SEQ ID NO: 388 - DNA, 1020 bp, Artificial Sequence
  CyHPPDm-F372V Nucleotide Sequence
atggaatttgattatttgcatttgtatgttgatgattatcaatctgctcatagatgttatcaaagacaatggggatttacttgtgttaataagattattactgatcaaggaattactggaatttatcaacaaggacaaattttgttgttgatttctgcttctgaatcttctttgtctagatatgctgattatttgcaaaagcatcctcctggagttggagaagttgcttggcaagttgctaattggcaaaagattcaacatcaattgtctgaattgcaaattgaaactactcctgttattcatcctttgactaaggctgaaggattgacttttttgttgtggggagatgttcatcattctatttatcctgttagatctgaattgaatcaaaataagactttgcatggagttggattgactactattgatcatgttgttttgaatattgctgctgatcaatttactcaagcttctcaatggtatcaacaagtttttggatggtctgttcaacaatcttttactgttaatactcctcattctggattgtattctgaagctttggcttctgctaatggaaaggttcaatttaatttgaattgtcctactaataattcttctcaaattcaaacttttttggctaataatcatggagctggaattcaacatgttgctttttctactacttctattactagaactgttgctcatttgagagaaagaggagttaattttttgaagattcctactggatattatcaacaacaaagaaattcttcttattttaattatgcttctttggattgggatactttgcaatgtttggaaattttgttggatgatcaagataatactggagaaagattgttgttgcaaattgtttctcaaccttgttatggagttggaactttgttttgggaaattattgaaagaagacatagagctaagggatttggacaaggaaattttcaagctttgtatgaagctgttgaaactttggaaaagcaattggaagttccttga

SEQ ID NO: 389 - protein, 350 aa, Artificial Sequence
  N1HPPDm-F372V Amino Acid Sequence
MAADSENPLGLHGFAFAEFTSPDPAAMARQFEQLGFVPAARRKDRGLTLYRQGRIAFILNAGEGEQASAFRAAHGPSANGMAFNVADAKAAHRHAIQSGATDADTAQSALPGTYAIEGIGDSLLYLVDSDPFADWDEVPGWREASAERGVGLDLLDHLTHNVRRGQMRVWSEFYATLFGFEEQKFFDIKGQATGLFSQAMIAPDHEIRIPLNESQDDNSQIEEFIREYNGEGIQHLALTTPDIYSTVEKLRANGVRLQDTIDTYYDLVDERVPGHGEDLARLRKNRILIDGDVHDEGLLLQIVTETMFGPIFFEIIQRKGNEGFGNGNFQVLYESIELDQIRRGVVTVDA

SEQ ID NO: 390 - DNA, 1053 bp, Artificial Sequence
  N1HPPDm-F372V Nucleotide Sequence
atggctgctgattctgaaaatcctttgggattgcatggatttgcttttgctgaatttacttctcctgatcctgctgctatggctagacaatttgaacaattgggatttgttcctgctgctagaagaaaggatagaggattgactttgtatagacaaggaagaattgcttttattttgaatgctggagaaggagaacaagcttctgcttttagagctgctcatggaccttctgctaatggaatggcttttaatgttgctgatgctaaggctgctcatagacatgctattcaatctggagctactgatgctgatactgctcaatctgctttgcctggaacttatgctattgaaggaattggagattctttgttgtatttggttgattctgatccttttgctgattgggatgaagttcctggatggagagaagcttctgctgaaagaggagttggattggatttgttggatcatttgactcataatgttagaagaggacaaatgagagtttggtctgaattttatgctactttgtttggatttgaagaacaaaagttttttgatattaagggacaagctactggattgttttctcaagctatgattgctcctgatcatgaaattagaattcctttgaatgaatctcaagatgataattctcaaattgaagaatttattagagaatataatggagaaggaattcaacatttggctttgactactcctgatatttattctactgttgaaaagttgagagctaatggagttagattgcaagatactattgatacttattatgatttggttgatgaaagagttcctggacatggagaagatttggctagattgagaaagaatagaattttgattgatggagatgttcatgatgaaggattgttgttgcaaattgttactgaaactatgtttggacctattttttttgaaattattcaaagaaagggaaatgaaggatttggaaatggaaattttcaagttttgtatgaatctattgaattggatcaaattagaagaggagttgttactgttgatgcttga

SEQ ID NO: 391 - protein, 363 aa, Artificial Sequence
  N2HPPDm-F372V Amino Acid Sequence
MTLFDNPLGLDGFEFVEFSAPAKGMLEPVFAAMGFVMIARHRSKDVQLWRQGGINLIANYEPRSPAAYFAAEHGPSACGMGWRVRNAAKAYELAVERGAEPVDVKTGPMELRLPAIRGIGGSIIYLIDRYEDEDGGLSIYDIDFVYEPGVDRHPEGAGFKIIDHLTHNVYGGRMAHWASFYERVFGFREIRYFDIKGEYTGLTSKAMTAPDGKIRIPLNEEGKAGGGQIEEFLRAYNGEGIQHIAFLCDDLIAAWDKLKALGTPLMTAPPATYYEMLDERLPGHGEPVAELQKRGILLDGSTQQGDPRLLLQIVGQATIGPVFFEFIQRKKDEGFGEGNFTALFESMERDQLRRGTLNAGESA

SEQ ID NO: 392 - DNA, 1092 bp, Artificial Sequence
  N2HPPDm-F372V Nucleotide Sequence
atgactttgtttgataatcctttgggattggatggatttgaatttgttgaattttctgctcctgctaagggaatgttggaacctgtttttgctgctatgggatttgttatgattgctagacatagatctaaggatgttcaattgtggagacaaggaggaattaatttgattgctaattatgaacctagatctcctgctgcttattttgctgctgaacatggaccttctgcttgtggaatgggatggagagttagaaatgctgctaaggcttatgaattggctgttgaaagaggagctgaacctgttgatgttaagactggacctatggaattgagattgcctgctattagaggaattggaggatctattatttatttgattgatagatatgaagatgaagatggaggattgtctatttatgatattgattttgtttatgaacctggagttgatagacatcctgaaggagctggatttaagattattgatcatttgactcataatgtttatggaggaagaatggctcattgggcttctttttatgaaagagtttttggatttagagaaattagatattttgatattaagggagaatatactggattgacttctaaggctatgactgctcctgatggaaagattagaattcctttgaatgaagaaggaaaggctggaggaggacaaattgaagaatttttgagagcttataatggagaaggaattcaacatattgcttttttgtgtgatgatttgattgctgcttgggataagttgaaggctttgggaactcctttgatgactgctcctcctgctacttattatgaaatgttggatgaaagattgcctggacatggagaacctgttgctgaattgcaaaagagaggaattttgttggatggatctactcaacaaggagatcctagattgttgttgcaaattgttggacaagctactattggacctgttttttttgaatttattcaaagaaagaaggatgaaggatttggagaaggaaattttactgctttgtttgaatctatggaaagagatcaattgagaagaggaactttgaatgctggagaatctgcttga

SEQ ID NO: 393 - protein, 365 aa, Artificial Sequence
  N3HPPDm-F372V Amino Acid Sequence
MQIPNWENPVGTDGFEFIEYTAPDPKALGQLFERMGFTAIARHRHKDVTVYRQGDINFIINAEPHSFAQRFARLHGPSICAIAFRVQDAAKAYQHALELGAWGFDNKTGPMELNIPAIKGIGDSLIYFVDRWRGKNGAQPGAIGDISIYDVDFEPIAGANPNPAGHGLTYIDHLTHNVHRGRMQEWAEFYERLFNFREVRYFDIEGKVTGVKSKAMTSPCGKIRIPINEEGSDTAGQIQEYLDAYHGEGIQHIALGTNDIYGAVDGLRGKEVKLLDTIDTYYELVDRRVPDHGESLDELKKRKILIDGARDDLLLQIVTENQIGPIFFEIIQRKGNQGFGEGNFKALFESIELDQIRRGVVQDKA

SEQ ID NO: 394 - DNA, 1098 bp, Artificial Sequence
  N3HPPDm-F372V Nucleotide Sequence
atgcaaattcctaattgggaaaatcctgttggaactgatggatttgaatttattgaatatactgctcctgatcctaaggctttgggacaattgtttgaaagaatgggatttactgctattgctagacatagacataaggatgttactgtttatagacaaggagatattaattttattattaatgctgaacctcattcttttgctcaaagatttgctagattgcatggaccttctatttgtgctattgcttttagagttcaagatgctgctaaggcttatcaacatgctttggaattgggagcttggggatttgataataagactggacctatggaattgaatattcctgctattaagggaattggagattctttgatttattttgttgatagatggagaggaaagaatggagctcaacctggagctattggagatatttctatttatgatgttgattttgaacctattgctggagctaatcctaatcctgctggacatggattgacttatattgatcatttgactcataatgttcatagaggaagaatgcaagaatgggctgaattttatgaaagattgtttaattttagagaagttagatattttgatattgaaggaaaggttactggagttaagtctaaggctatgacttctccttgtggaaagattagaattcctattaatgaagaaggatctgatactgctggacaaattcaagaatatttggatgcttatcatggagaaggaattcaacatattgctttgggaactaatgatatttatggagctgttgatggattgagaggaaaggaagttaagttgttggatactattgatacttattatgaattggttgatagaagagttcctgatcatggagaatctttggatgaattgaagaagagaaagattttgattgatggagctagagatgatttgttgttgcaaattgttactgaaaatcaaattggacctattttttttgaaattattcaaagaaagggaaatcaaggatttggagaaggaaattttaaggctttgtttgaatctattgaattggatcaaattagaagaggagttgttcaagataaggcttga

SEQ ID NO: 395 - protein, 365 aa, Artificial Sequence
  N4HPPDm-F372V Amino Acid Sequence
MQIPNWENPVGTDGFEFIEYTAPDPKALGQLFERMGFTAIARHRHKDVTVYRQGDINFIINAEPDSFAQRFARLHGPSICAIAFRVQDAAKAYQHALELGAWGFDNKTGPMELNIPAIKGIGDSLIYFVDRWRGKNGAQPGAIGDISIYDVDFEPIAGATPNPAGHGLTYIDHLTHNVHRGRMQEWAEFYERLFNFREVRYFDIEGKVTGVKSKAMTSPCGKIRIPINEEGSDTAGQIQEYLDAYHGEGIQHIALGTSDIYGAVDGLRGKEVKLLDTIDTYYELVDRRVPDHGESLDELKKRKILIDGARDDLLLQIVTENQIGPIFFEIIQRKGNQGFGEGTFKALFESIELDQIRRGVVQDKA

SEQ ID NO: 396 - DNA, 1098 bp, Artificial Sequence
  N4HPPDm-F372V Nucleotide Sequence
atgcaaattcctaattgggaaaatcctgttggaactgatggatttgaatttattgaatatactgctcctgatcctaaggctttgggacaattgtttgaaagaatgggatttactgctattgctagacatagacataaggatgttactgtttatagacaaggagatattaattttattattaatgctgaacctgattcttttgctcaaagatttgctagattgcatggaccttctatttgtgctattgcttttagagttcaagatgctgctaaggcttatcaacatgctttggaattgggagcttggggatttgataataagactggacctatggaattgaatattcctgctattaagggaattggagattctttgatttattttgttgatagatggagaggaaagaatggagctcaacctggagctattggagatatttctatttatgatgttgattttgaacctattgctggagctactcctaatcctgctggacatggattgacttatattgatcatttgactcataatgttcatagaggaagaatgcaagaatgggctgaattttatgaaagattgtttaattttagagaagttagatattttgatattgaaggaaaggttactggagttaagtctaaggctatgacttctccttgtggaaagattagaattcctattaatgaagaaggatctgatactgctggacaaattcaagaatatttggatgcttatcatggagaaggaattcaacatattgctttgggaacttctgatatttatggagctgttgatggattgagaggaaaggaagttaagttgttggatactattgatacttattatgaattggttgatagaagagttcctgatcatggagaatctttggatgaattgaagaagagaaagattttgattgatggagctagagatgatttgttgttgcaaattgttactgaaaatcaaattggacctattttttttgaaattattcaaagaaagggaaatcaaggatttggagaaggaacttttaaggctttgtttgaatctattgaattggatcaaattagaagaggagttgttcaagataaggcttga

SEQ ID NO: 397 - protein, 350 aa, Artificial Sequence
  N5HPPDm-F372V Amino Acid Sequence
MAADSENPLGLHGFAFAEFTSPDPAAMARQFEQLGFVPAARRKDRGLTLYRQGRIAFILNAGEGEQASAFRAAHGPSANGMAFNVADAKAAHRHAIQSGATDADTAQSALPGTYAIEGIGDSLLYLVDSDPFADWDEVPGWREASAERGVGLDLLDHLTHNVRRGQMRVWSEFYATLFGFEEQKFFDIKGQATGLFSQAMIAPDHEIRIPLNESQDDNSQIEEFIREYNGEGIQHLALTTPDIYSTVEKLRANGVRLQDTIDTYYDLVDERVPGHGEDLARLRKNRILIDGDVHDEGLLLQIVTETMFGPIFFEIIQRKGNEGFGNGNFQVLFESIELDQIRRGVVTVDA

SEQ ID NO: 398 - DNA, 1053 bp, Artificial Sequence
  N5HPPDm-F372V Nucleotide Sequence
atggctgctgattctgaaaatcctttgggattgcatggatttgcttttgctgaatttacttctcctgatcctgctgctatggctagacaatttgaacaattgggatttgttcctgctgctagaagaaaggatagaggattgactttgtatagacaaggaagaattgcttttattttgaatgctggagaaggagaacaagcttctgcttttagagctgctcatggaccttctgctaatggaatggcttttaatgttgctgatgctaaggctgctcatagacatgctattcaatctggagctactgatgctgatactgctcaatctgctttgcctggaacttatgctattgaaggaattggagattctttgttgtatttggttgattctgatccttttgctgattgggatgaagttcctggatggagagaagcttctgctgaaagaggagttggattggatttgttggatcatttgactcataatgttagaagaggacaaatgagagtttggtctgaattttatgctactttgtttggatttgaagaacaaaagttttttgatattaagggacaagctactggattgttttctcaagctatgattgctcctgatcatgaaattagaattcctttgaatgaatctcaagatgataattctcaaattgaagaatttattagagaatataatggagaaggaattcaacatttggctttgactactcctgatatttattctactgttgaaaagttgagagctaatggagttagattgcaagatactattgatacttattatgatttggttgatgaaagagttcctggacatggagaagatttggctagattgagaaagaatagaattttgattgatggagatgttcatgatgaaggattgttgttgcaaattgttactgaaactatgtttggacctattttttttgaaattattcaaagaaagggaaatgaaggatttggaaatggaaattttcaagttttgtttgaatctattgaattggatcaaattagaagaggagttgttactgttgatgcttga

SEQ ID NO: 399 - DNA, 24 bp, Artificial Sequence
  5'end universal adapter primer 1
agtttttctgattaacagactagt

SEQ ID NO: 400 - DNA, 25 bp, Artificial Sequence
  3'end universal adapter primer 1 or 2
caaatgtttgaacgatcggcgcgcc

SEQ ID NO: 401 - DNA, 25 bp, Artificial Sequence
  primer 1
ctggaaggcgaggacgtcatcaata

SEQ ID NO: 402 - DNA, 22 bp, Artificial Sequence
  primer 2
tggcggcattgccgaaatcgag

SEQ ID NO: 403 - DNA, 28 bp, Artificial Sequence
  probe 1
atgcaggcgatgggcgcccgcatccgta

SEQ ID NO: 404 - DNA, 24 bp, Artificial Sequence
  5'end universal adapter primer 2
tgcagataccaagcggccactagt

SEQ ID NO: 405 - DNA, 1411 bp, Oryza sativa
  Rice actin 1 promoter
tactcgaggtcattcatatgcttgagaagagagtcgggatagtccaaaataaaacaaaggtaagattacctggtcaaaagtgaaaacatcagttaaaaggtggtataaagtaaaatatcggtaataaaaggtggcccaaagtgaaatttactcttttctactattataaaaattgaggatgtttttgtcggtactttgatacgtcatttttgtatgaattggtttttaagtttattcgcttttggaaatgcatatctgtatttgagtcgggttttaagttcgtttgcttttgtaaatacagagggatttgtataagaaatatctttagaaaaacccatatgctaatttgacataatttttgagaaaaatatatattcaggcgaattctcacaatgaacaataataagattaaaatagctttcccccgttgcagcgcatgggtattttttctagtaaaaataaaagataaacttagactcaaaacatttacaaaaacaacccctaaagttcctaaagcccaaagtgctatccacgatccatagcaagcccagcccaacccaacccaacccaacccaccccagtccagccaactggacaatagtctccacacccccccactatcaccgtgagttgtccgcacgcaccgcacgtctcgcagccaaaaaaaaaaagaaagaaaaaaaagaaaaagaaaaaacagcaggtgggtccgggtcgtgggggccggaaacgcgaggaggatcgcgagccagcgacgaggccggccctccctccgcttccaaagaaacgccccccatcgccactatatacatacccccccctctcctcccatccccccaaccctaccaccaccaccaccaccacctccacctcctcccccctcgctgccggacgacgagctcctcccccctccccctccgccgccgccgcgccggtaaccaccccgcccctctcctctttctttctccgtttttttttccgtctcggtctcgatctttggccttggtagtttgggtgggcgagaggcggcttcgtgcgcgcccagatcggtgcgcgggaggggcgggatctcgcggctggggctctcgccggcgtggatccggcccggatctcgcggggaatggggctctcggatgtagatctgcgatccgccgttgttgggggagatgatggggggtttaaaatttccgccgtgctaaacaagatcaggaagaggggaaaagggcactatggtttatatttttatatatttctgctgcttcgtcaggcttagatgtgctagatctttctttcttctttttgtgggtagaatttgaatccctcagcattgttcatcggtagtttttcttttcatgatttgtgacaaatgcagcctcgtgcggagcttttttgtaggtagaagtgatcaacc

SEQ ID NO: 406 - DNA, 806 bp, Zea mays
  Zea mays heat shock 70 kDa protein intron
accgtcttcggtacgcgctcactccgccctctgcctttgttactgccacgtttctctgaatgctctcttgtgtggtgattgctgagagtggtttagctggatctagaattacactctgaaatcgtgttctgcctgtgctgattacttgccgtcctttgtagcagcaaaatatagggacatggtagtacgaaacgaagatagaacctacacagcaatacgagaaatgtgtaatttggtgcttagcggtatttatttaagcacatgttggtgttatagggcacttggattcagaagtttgctgttaatttaggcacaggcttcatactacatgggtcaatagtatagggattcatattataggcgatactataataatttgttcgtctgcagagcttattatttgccaaaattagatattcctattctgtttttgtttgtgtgctgttaaattgttaacgcctgaaggaataaatataaatgacgaaattttgatgtttatctctgctcctttattgtgaccataagtcaagatcagatgcacttgttttaaatattgttgtctgaagaaataagtactgacagtattttgatgcattgatctgcttgtttgttgtaacaaaatttaaaaataaagagtttcctttttgttgctctccttacctcctgatggtatctagtatctaccaactgacactatattgcttctctttacatacgtatcttgctcgatgccttctccctagtgttgaccagtgttactcacatagtctttgctcatttcattgtaatgcagataccaagcggcc

SEQ ID NO: 407 - DNA, 1993 bp, Zea mays
  Zea mays Ubiquitin 1 gene promoter
ctgcagtgcagcgtgacccggtcgtgcccctctctagagataatgagcattgcatgtctaagttataaaaaattaccacatattttttttgtcacacttgtttgaagtgcagtttatctatctttatacatatatttaaactttactctacgaataatataatctatagtactacaataatatcagtgttttagagaatcatataaatgaacagttagacatggtctaaaggacaattgagtattttgacaacaggactctacagttttatctttttagtgtgcatgtgttctcctttttttttgcaaatagcttcacctatataatacttcatccattttattagtacatccatttagggtttagggttaatggtttttatagactaatttttttagtacatctattttattctattttagcctctaaattaagaaaactaaaactctattttagtttttttatttaataatttagatataaaatagaataaaataaagtgactaaaaattaaacaaataccctttaagaaattaaaaaaactaaggaaacatttttcttgtttcgagtagataatgccagcctgttaaacgccgtcgacgagtctaacggacaccaaccagcgaaccagcagcgtcgcgtcgggccaagcgaagcagacggcacggcatctctgtcgctgcctctggacccctctcgagagttccgctccaccgttggacttgctccgctgtcggcatccagaaattgcgtggcggagcggcagacgtgagccggcacggcaggcggcctcctcctcctctcacggcaccggcagctacgggggattcctttcccaccgctccttcgctttcccttcctcgcccgccgtaataaatagacaccccctccacaccctctttccccaacctcgtgttgttcggagcgcacacacacacaaccagatctcccccaaatccacccgtcggcacctccgcttcaaggtacgccgctcgtcctccccccccccccctctctaccttctctagatcggcgttccggtccatggttagggcccggtagttctacttctgttcatgtttgtgttagatccgtgtttgtgttagatccgtgctgctagcgttcgtacacggatgcgacctgtacgtcagacacgttctgattgctaacttgccagtgtttctctttggggaatcctgggatggctctagccgttccgcagacgggatcgatttcatgattttttttgtttcgttgcatagggtttggtttgcccttttcctttatttcaatatatgccgtgcacttgtttgtcgggtcatcttttcatgcttttttttgtcttggttgtgatgatgtggtctggttgggcggtcgttctagatcggagtagaattctgtttcaaactacctggtggatttattaattttggatctgtatgtgtgtgccatacatattcatagttacgaattgaagatgatggatggaaatatcgatctaggataggtatacatgttgatgcgggttttactgatgcatatacagagatgctttttgttcgcttggttgtgatgatgtggtgtggttgggcggtcgttcattcgttctagatcggagtagaatactgtttcaaactacctggtgtatttattaattttggaactgtatgtgtgtgtcatacatcttcatagttacgagtttaagatggatggaaatatcgatctaggataggtatacatgttgatgtgggttttactgatgcatatacatgatggcatatgcagcatctattcatatgctctaaccttgagtacctatctattataataaacaagtatgttttataattattttgatcttgatatacttggatgatggcatatgcagcagctatatgtggatttttttagccctgccttcatacgctatttatttgcttggtactgtttcttttgtcgatgctcaccctgttgtttggtgttacttctgcag

SEQ ID NO: 408 - DNA, 1026 bp, Streptomyces hygroscopicus
  Hygromycin phosphotransferase gene
atgaaaaagcctgaactcaccgcgacgtctgtcgagaagtttctgatcgaaaagttcgacagcgtctccgacctgatgcagctctcggagggcgaagaatctcgtgctttcagcttcgatgtaggagggcgtggatatgtcctgcgggtaaatagctgcgccgatggtttctacaaagatcgttatgtttatcggcactttgcatcggccgcgctcccgattccggaagtgcttgacattggggagtttagcgagagcctgacctattgcatctcccgccgttcacagggtgtcacgttgcaagacctgcctgaaaccgaactgcccgctgttctacaaccggtcgcggaggctatggatgcgatcgctgcggccgatcttagccagacgagcgggttcggcccattcggaccgcaaggaatcggtcaatacactacatggcgtgatttcatatgcgcgattgctgatccccatgtgtatcactggcaaactgtgatggacgacaccgtcagtgcgtccgtcgcgcaggctctcgatgagctgatgctttgggccgaggactgccccgaagtccggcacctcgtgcacgcggatttcggctccaacaatgtcctgacggacaatggccgcataacagcggtcattgactggagcgaggcgatgttcggggattcccaatacgaggtcgccaacatcttcttctggaggccgtggttggcttgtatggagcagcagacgcgctacttcgagcggaggcatccggagcttgcaggatcgccacgactccgggcgtatatgctccgcattggtcttgaccaactctatcagagcttggttgacggcaatttcgatgatgcagcttgggcgcagggtcgatgcgacgcaatcgtccgatccggagccgggactgtcgggcgtacacaaatcgcccgcagaagcgcggccgtctggaccgatggctgtgtagaagtactcgccgatagtggaaaccgacgccccagcactcgtccgagggcaaagaaatag

SEQ ID NO: 409 - DNA, 22 bp, Artificial Sequence
  primer 3
gcataacagcggtcattgactg

SEQ ID NO: 410 - DNA, 20 bp, Artificial Sequence
  primer 4
agaagatgttggcgacctcg

SEQ ID NO: 411 - DNA, 23 bp, Artificial Sequence
  probe 2
agcgaggcgatgttcggggattc

SEQ ID NO: 412 - protein, 439 aa, Artificial Sequence
  AsHPPDm-F372A-A110 Amino Acid Sequence
MPPTPATATGAAAAAVTPEHAARSFPRVVRVNPRSDRFPVLSFHHVELWCADAASAAGRFSFALGAPLAARSDLSTGNSAHASLLLRSGALAFLFTAPYAPPPQEAATAATASIPSFSADAARTFAAAHGLAVRSVGVRVADAAEAFRVSVAGGARPAFAPADLGHGFGLAEVELYGDVVLRFVSYPDETDLPFLPGFERVSSPGAVDYGLTRFDHVVGNVPEMAPVIDYMKGFLGFHEFAEFTAEDVGTTESGLNSVVLANNSEAVLLPLNEPVHGTKRRSQIQTYLEYHGGPGVQHIALASNDVLRTLREMRARTPMGGFEFMAPPQAKYYEGVRRIAGDVLSEEQIKECQELGVLVDRDDQGVLLQIATKPVGDRPTFFLEMIQRIGCMEKDEVGQEYQKGGCGGFGKGNFSELFKSIEDYEKSLEVKQSVVAQKS

SEQ ID NO: 413 - DNA, 1320 bp, Artificial Sequence
  AsHPPDm-F372A-A110 Nucleotide Sequence
atgccacctactccagctacagctactggtgctgctgctgctgccgttactcctgagcacgctgccaggtcattccccagggtggttcgcgtgaaccccagatctgataggttcccagttctgagcttccaccatgttgagctgtggtgcgctgatgctgcttctgctgctggcaggttctctttcgctcttggtgctccactcgctgctagatctgatctgtctacaggaaatagcgctcatgcctcactcctgcttcgctcaggtgctttggccttcctcttcaccgctccatatgctcccccacctcaggaggctgctactgctgctacagcctccattccaagcttctcagctgatgccgctagaaccttcgctgctgctcatggacttgccgtgaggtctgttggtgttcgcgtggctgatgctgctgaggctttcagagtttccgttgccggcggagctaggccagctttcgctcctgctgatttgggacatggtttcggcctggctgaggttgagctttacggtgacgtggttctccgcttcgtgtcttacccagatgagactgacctgcctttccttcccggcttcgagagagtttcctctcctggtgccgtggattacggcctgacaaggttcgaccacgtggttggaaacgttcccgagatggctccagtgatcgattacatgaagggcttccttggattccatgagttcgccgagttcactgctgaggacgtgggaaccactgagtccggtttgaactctgtggttctcgccaacaattctgaggctgttttgctccctctgaatgagcctgtgcatggaaccaagaggagaagccagattcaaacttacctggagtaccacggtggccctggagttcagcatatcgcccttgcttctaatgatgtgttgcgcacactcagagagatgcgcgccagaacccccatgggaggtttcgagttcatggccccaccacaggctaagtactacgagggcgttagaaggattgctggagacgtgttgagcgaggagcagatcaaggagtgccaagagctgggtgttcttgtggatagggatgaccagggcgttctgcttcaaattgctactaagccagtgggcgaccgccctacattcttccttgagatgattcaaagaatcggctgcatggagaaggatgaggttggacaggagtaccaaaagggcggatgcggtggcttcggaaagggtaacttcagcgagttgttcaagtcaatcgaggactacgagaagagcctcgaggtgaagcagtcagtggttgcccaaaagtcctga

SEQ ID NO: 414 - protein, 439 aa, Artificial Sequence
  AsHPPDm-A110 Amino Acid Sequence
MPPTPATATGAAAAAVTPEHAARSFPRVVRVNPRSDRFPVLSFHHVELWCADAASAAGRFSFALGAPLAARSDLSTGNSAHASLLLRSGALAFLFTAPYAPPPQEAATAATASIPSFSADAARTFAAAHGLAVRSVGVRVADAAEAFRVSVAGGARPAFAPADLGHGFGLAEVELYGDVVLRFVSYPDETDLPFLPGFERVSSPGAVDYGLTRFDHVVGNVPEMAPVIDYMKGFLGFHEFAEFTAEDVGTTESGLNSVVLANNSEAVLLPLNEPVHGTKRRSQIQTYLEYHGGPGVQHIALASNDVLRTLREMRARTPMGGFEFMAPPQAKYYEGVRRIAGDVLSEEQIKECQELGVLVDRDDQGVLLQIFTKPVGDRPTFFLEMIQRIGCMEKDEVGQEYQKGGCGGFGKGNFSELFKSIEDYEKSLEVKQSVVAQKS

SEQ ID NO: 415 - DNA, 1320 bp, Artificial Sequence
  AsHPPDm-A110 Nucleotide Sequence
atgccacctactccagctacagctactggtgctgctgctgctgccgttactcctgagcacgctgccaggtcattccccagggtggttcgcgtgaaccccagatctgataggttcccagttctgagcttccaccatgttgagctgtggtgcgctgatgctgcttctgctgctggcaggttctctttcgctcttggtgctccactcgctgctagatctgatctgtctacaggaaatagcgctcatgcctcactcctgcttcgctcaggtgctttggccttcctcttcaccgctccatatgctcccccacctcaggaggctgctactgctgctacagcctccattccaagcttctcagctgatgccgctagaaccttcgctgctgctcatggacttgccgtgaggtctgttggtgttcgcgtggctgatgctgctgaggctttcagagtttccgttgccggcggagctaggccagctttcgctcctgctgatttgggacatggtttcggcctggctgaggttgagctttacggtgacgtggttctccgcttcgtgtcttacccagatgagactgacctgcctttccttcccggcttcgagagagtttcctctcctggtgccgtggattacggcctgacaaggttcgaccacgtggttggaaacgttcccgagatggctccagtgatcgattacatgaagggcttccttggattccatgagttcgccgagttcactgctgaggacgtgggaaccactgagtccggtttgaactctgtggttctcgccaacaattctgaggctgttttgctccctctgaatgagcctgtgcatggaaccaagaggagaagccagattcaaacttacctggagtaccacggtggccctggagttcagcatatcgcccttgcttctaatgatgtgttgcgcacactcagagagatgcgcgccagaacccccatgggaggtttcgagttcatggccccaccacaggctaagtactacgagggcgttagaaggattgctggagacgtgttgagcgaggagcagatcaaggagtgccaagagctgggtgttcttgtggatagggatgaccagggcgttctgcttcaaattttcactaagccagtgggcgaccgccctacattcttccttgagatgattcaaagaatcggctgcatggagaaggatgaggttggacaggagtaccaaaagggcggatgcggtggcttcggaaagggtaacttcagcgagttgttcaagtcaatcgaggactacgagaagagcctcgaggtgaagcagtcagtggttgcccaaaagtcctga

SEQ ID NO: 416 - protein, 358 aa, Artificial Sequence
  PfHPPDm-F372A-G413W Amino Acid Sequence
MADLYENPMGLMGFEFIEFASPTPGTLEPIFEIMGFTKVATHRSKNVHLYRQGEINLILNNEPNSIASYFAAEHGPSVCGMAFRVKDSQKAYNRALELGAQPIHIDTGPMELNLPAIKGIGGAPLYLIDRFGEGSSIYDIDFVYLEGVERNPVGAGLKVIDHLTHNVYRGRMVYWANFYEKLFNFREARYFDIKGEYTGLTSKAMSAPDGMIRIPLNEESSKGAGQIEEFLMQFNGEGIQHVAFLTDDLVKTWDALKKIGMRFMTAPPDTYYEMLEGRLPDHGEPVDQLQARGILLDGSSVEGDKRLLLQIASETLMGPVFFEFIQRKGDDGFGEWNFKALFESIERDQVRRGVLTAD

SEQ ID NO: 417 - DNA, 1077 bp, Artificial Sequence
  PfHPPDm-F372A-G413W Nucleotide Sequence
atggccgatttgtacgagaacccaatgggactcatgggtttcgagttcattgagttcgcttcccccaccccaggtactttggagcctattttcgagatcatgggcttcactaaggttgccacacacaggtctaagaatgtgcatctctaccgccaaggagagattaacctgatccttaacaatgagcctaatagcatcgcctcatacttcgctgctgagcatggtccatctgtttgcggcatggctttcagagtgaaggattcacaaaaggcctacaacagggctttggagctcggcgcccagcccattcatatcgacaccggacctatggagctgaatcttcctgccattaagggcatcggcggagctccattgtacctcattgatcgcttcggcgagggctcctctatctacgatatcgacttcgtgtacctggagggcgttgagagaaaccctgtgggagctggtctgaaggttatcgaccaccttactcataatgtttacagaggaaggatggtgtactgggccaacttctacgagaagctgttcaatttccgcgaggctagatacttcgatattaagggcgagtacacaggacttacctccaaggccatgtctgctcccgacggtatgattaggatcccattgaacgaggagagctcaaagggcgccggacagattgaggagttcctcatgcaattcaatggtgaaggcatccagcacgttgctttcctgacagatgaccttgtgaagacctgggatgccctcaagaagattggcatgaggttcatgaccgctccacctgacacttactacgagatgttggagggacgcctccctgatcatggcgagcccgttgaccagctgcaagctagaggaatcctcctggatggttcctctgtggagggcgacaagaggcttttgctccaaattgctagcgagactcttatgggacccgtgttcttcgagttcatccagaggaagggcgatgacggattcggcgagtggaacttcaaggccctgttcgagtctattgagagagatcaggtgaggcgcggcgttcttacagctgactga

SEQ ID NO: 418 - protein, 358 aa, Artificial Sequence
  PfHPPDm-G413W Amino Acid Sequence
MADLYENPMGLMGFEFIEFASPTPGTLEPIFEIMGFTKVATHRSKNVHLYRQGEINLILNNEPNSIASYFAAEHGPSVCGMAFRVKDSQKAYNRALELGAQPIHIDTGPMELNLPAIKGIGGAPLYLIDRFGEGSSIYDIDFVYLEGVERNPVGAGLKVIDHLTHNVYRGRMVYWANFYEKLFNFREARYFDIKGEYTGLTSKAMSAPDGMIRIPLNEESSKGAGQIEEFLMQFNGEGIQHVAFLTDDLVKTWDALKKIGMRFMTAPPDTYYEMLEGRLPDHGEPVDQLQARGILLDGSSVEGDKRLLLQIFSETLMGPVFFEFIQRKGDDGFGEWNFKALFESIERDQVRRGVLTAD

SEQ ID NO: 419 - DNA, 1077 bp, Artificial Sequence
  PfHPPDm-G413W Nucleotide Sequence
atggccgatttgtacgagaacccaatgggactcatgggtttcgagttcattgagttcgcttcccccaccccaggtactttggagcctattttcgagatcatgggcttcactaaggttgccacacacaggtctaagaatgtgcatctctaccgccaaggagagattaacctgatccttaacaatgagcctaatagcatcgcctcatacttcgctgctgagcatggtccatctgtttgcggcatggctttcagagtgaaggattcacaaaaggcctacaacagggctttggagctcggcgcccagcccattcatatcgacaccggacctatggagctgaatcttcctgccattaagggcatcggcggagctccattgtacctcattgatcgcttcggcgagggctcctctatctacgatatcgacttcgtgtacctggagggcgttgagagaaaccctgtgggagctggtctgaaggttatcgaccaccttactcataatgtttacagaggaaggatggtgtactgggccaacttctacgagaagctgttcaatttccgcgaggctagatacttcgatattaagggcgagtacacaggacttacctccaaggccatgtctgctcccgacggtatgattaggatcccattgaacgaggagagctcaaagggcgccggacagattgaggagttcctcatgcaattcaatggtgaaggcatccagcacgttgctttcctgacagatgaccttgtgaagacctgggatgccctcaagaagattggcatgaggttcatgaccgctccacctgacacttactacgagatgttggagggacgcctccctgatcatggcgagcccgttgaccagctgcaagctagaggaatcctcctggatggttcctctgtggagggcgacaagaggcttttgctccaaattttcagcgagactcttatgggacccgtgttcttcgagttcatccagaggaagggcgatgacggattcggcgagtggaacttcaaggccctgttcgagtctattgagagagatcaggtgaggcgcggcgttcttacagctgactga

SEQ ID NO: 420 - protein, 440 aa, Artificial Sequence
  AsHPPDm-Q284A Amino Acid Sequence
MPPTPATATGAAAAAVTPEHAARSFPRVVRVNPRSDRFPVLSFHHVELWCADAASAAGRFSFALGAPLAARSDLSTGNSAHASLLLRSGALAFLFTAPYAPPPQEAATAAATASIPSFSADAARTFAAAHGLAVRSVGVRVADAAEAFRVSVAGGARPAFAPADLGHGFGLAEVELYGDVVLRFVSYPDETDLPFLPGFERVSSPGAVDYGLTRFDHVVGNVPEMAPVIDYMKGFLGFHEFAEFTAEDVGTTESGLNSVVLANNSEAVLLPLNEPVHGTKRRSAIQTYLEYHGGPGVQHIALASNDVLRTLREMRARTPMGGFEFMAPPQAKYYEGVRRIAGDVLSEEQIKECQELGVLVDRDDQGVLLQIFTKPVGDRPTFFLEMIQRIGCMEKDEVGQEYQKGGCGGFGKGNFSELFKSIEDYEKSLEVKQSVVAQKS

SEQ ID NO: 421 - DNA, 1323 bp, Artificial Sequence
  AsHPPDm-Q284A Nucleotide Sequence
atgccacctactccagctacagctactggtgctgctgctgctgccgttactcctgagcacgctgccaggtcattccccagggtggttcgcgtgaaccccagatctgataggttcccagttctgagcttccaccatgttgagctgtggtgcgctgatgctgcttctgctgctggcaggttctctttcgctcttggtgctccactcgctgctagatctgatctgtctacaggaaatagcgctcatgcctcactcctgcttcgctcaggtgctttggccttcctcttcaccgctccatatgctcccccacctcaggaggctgctactgctgctgctacagcctccattccaagcttctcagctgatgccgctagaaccttcgctgctgctcatggacttgccgtgaggtctgttggtgttcgcgtggctgatgctgctgaggctttcagagtttccgttgccggcggagctaggccagctttcgctcctgctgatttgggacatggtttcggcctggctgaggttgagctttacggtgacgtggttctccgcttcgtgtcttacccagatgagactgacctgcctttccttcccggcttcgagagagtttcctctcctggtgccgtggattacggcctgacaaggttcgaccacgtggttggaaacgttcccgagatggctccagtgatcgattacatgaagggcttccttggattccatgagttcgccgagttcactgctgaggacgtgggaaccactgagtccggtttgaactctgtggttctcgccaacaattctgaggctgttttgctccctctgaatgagcctgtgcatggaaccaagaggagaagcgctattcaaacttacctggagtaccacggtggccctggagttcagcatatcgcccttgcttctaatgatgtgttgcgcacactcagagagatgcgcgccagaacccccatgggaggtttcgagttcatggccccaccacaggctaagtactacgagggcgttagaaggattgctggagacgtgttgagcgaggagcagatcaaggagtgccaagagctgggtgttcttgtggatagggatgaccagggcgttctgcttcaaattttcactaagccagtgggcgaccgccctacattcttccttgagatgattcaaagaatcggctgcatggagaaggatgaggttggacaggagtaccaaaagggcggatgcggtggcttcggaaagggtaacttcagcgagttgttcaagtcaatcgaggactacgagaagagcctcgaggtgaagcagtcagtggttgcccaaaagtcctga

SEQ ID NO: 422 - protein, 440 aa, Artificial Sequence
  AsHPPDm-L359W Amino Acid Sequence
MPPTPATATGAAAAAVTPEHAARSFPRVVRVNPRSDRFPVLSFHHVELWCADAASAAGRFSFALGAPLAARSDLSTGNSAHASLLLRSGALAFLFTAPYAPPPQEAATAAATASIPSFSADAARTFAAAHGLAVRSVGVRVADAAEAFRVSVAGGARPAFAPADLGHGFGLAEVELYGDVVLRFVSYPDETDLPFLPGFERVSSPGAVDYGLTRFDHVVGNVPEMAPVIDYMKGFLGFHEFAEFTAEDVGTTESGLNSVVLANNSEAVLLPLNEPVHGTKRRSQIQTYLEYHGGPGVQHIALASNDVLRTLREMRARTPMGGFEFMAPPQAKYYEGVRRIAGDVLSEEQIKECQELGVWVDRDDQGVLLQIFTKPVGDRPTFFLEMIQRIGCMEKDEVGQEYQKGGCGGFGKGNFSELFKSIEDYEKSLEVKQSVVAQKS

SEQ ID NO: 423 - DNA, 1323 bp, Artificial Sequence
  AsHPPDm-L359W Nucleotide Sequence
atgccacctactccagctacagctactggtgctgctgctgctgccgttactcctgagcacgctgccaggtcattccccagggtggttcgcgtgaaccccagatctgataggttcccagttctgagcttccaccatgttgagctgtggtgcgctgatgctgcttctgctgctggcaggttctctttcgctcttggtgctccactcgctgctagatctgatctgtctacaggaaatagcgctcatgcctcactcctgcttcgctcaggtgctttggccttcctcttcaccgctccatatgctcccccacctcaggaggctgctactgctgctgctacagcctccattccaagcttctcagctgatgccgctagaaccttcgctgctgctcatggacttgccgtgaggtctgttggtgttcgcgtggctgatgctgctgaggctttcagagtttccgttgccggcggagctaggccagctttcgctcctgctgatttgggacatggtttcggcctggctgaggttgagctttacggtgacgtggttctccgcttcgtgtcttacccagatgagactgacctgcctttccttcccggcttcgagagagtttcctctcctggtgccgtggattacggcctgacaaggttcgaccacgtggttggaaacgttcccgagatggctccagtgatcgattacatgaagggcttccttggattccatgagttcgccgagttcactgctgaggacgtgggaaccactgagtccggtttgaactctgtggttctcgccaacaattctgaggctgttttgctccctctgaatgagcctgtgcatggaaccaagaggagaagccagattcaaacttacctggagtaccacggtggccctggagttcagcatatcgcccttgcttctaatgatgtgttgcgcacactcagagagatgcgcgccagaacccccatgggaggtttcgagttcatggccccaccacaggctaagtactacgagggcgttagaaggattgctggagacgtgttgagcgaggagcagatcaaggagtgccaagagctgggtgtttgggtggatagggatgaccagggcgttctgcttcaaattttcactaagccagtgggcgaccgccctacattcttccttgagatgattcaaagaatcggctgcatggagaaggatgaggttggacaggagtaccaaaagggcggatgcggtggcttcggaaagggtaacttcagcgagttgttcaagtcaatcgaggactacgagaagagcctcgaggtgaagcagtcagtggttgcccaaaagtcctga

SEQ ID NO: 424 - protein, 440 aa, Artificial Sequence
  AsHPPDm-F415A Amino Acid Sequence
MPPTPATATGAAAAAVTPEHAARSFPRVVRVNPRSDRFPVLSFHHVELWCADAASAAGRFSFALGAPLAARSDLSTGNSAHASLLLRSGALAFLFTAPYAPPPQEAATAAATASIPSFSADAARTFAAAHGLAVRSVGVRVADAAEAFRVSVAGGARPAFAPADLGHGFGLAEVELYGDVVLRFVSYPDETDLPFLPGFERVSSPGAVDYGLTRFDHVVGNVPEMAPVIDYMKGFLGFHEFAEFTAEDVGTTESGLNSVVLANNSEAVLLPLNEPVHGTKRRSQIQTYLEYHGGPGVQHIALASNDVLRTLREMRARTPMGGFEFMAPPQAKYYEGVRRIAGDVLSEEQIKECQELGVLVDRDDQGVLLQIFTKPVGDRPTFFLEMIQRIGCMEKDEVGQEYQKGGCGGFGKGNASELFKSIEDYEKSLEVKQSVVAQKS

SEQ ID NO: 425 - DNA, 1323 bp, Artificial Sequence
  AsHPPDm-F415A Nucleotide Sequence
atgccacctactccagctacagctactggtgctgctgctgctgccgttactcctgagcacgctgccaggtcattccccagggtggttcgcgtgaaccccagatctgataggttcccagttctgagcttccaccatgttgagctgtggtgcgctgatgctgcttctgctgctggcaggttctctttcgctcttggtgctccactcgctgctagatctgatctgtctacaggaaatagcgctcatgcctcactcctgcttcgctcaggtgctttggccttcctcttcaccgctccatatgctcccccacctcaggaggctgctactgctgctgctacagcctccattccaagcttctcagctgatgccgctagaaccttcgctgctgctcatggacttgccgtgaggtctgttggtgttcgcgtggctgatgctgctgaggctttcagagtttccgttgccggcggagctaggccagctttcgctcctgctgatttgggacatggtttcggcctggctgaggttgagctttacggtgacgtggttctccgcttcgtgtcttacccagatgagactgacctgcctttccttcccggcttcgagagagtttcctctcctggtgccgtggattacggcctgacaaggttcgaccacgtggttggaaacgttcccgagatggctccagtgatcgattacatgaagggcttccttggattccatgagttcgccgagttcactgctgaggacgtgggaaccactgagtccggtttgaactctgtggttctcgccaacaattctgaggctgttttgctccctctgaatgagcctgtgcatggaaccaagaggagaagccagattcaaacttacctggagtaccacggtggccctggagttcagcatatcgcccttgcttctaatgatgtgttgcgcacactcagagagatgcgcgccagaacccccatgggaggtttcgagttcatggccccaccacaggctaagtactacgagggcgttagaaggattgctggagacgtgttgagcgaggagcagatcaaggagtgccaagagctgggtgttcttgtggatagggatgaccagggcgttctgcttcaaattttcactaagccagtgggcgaccgccctacattcttccttgagatgattcaaagaatcggctgcatggagaaggatgaggttggacaggagtaccaaaagggcggatgcggtggcttcggaaagggtaacgctagcgagttgttcaagtcaatcgaggactacgagaagagcctcgaggtgaagcagtcagtggttgcccaaaagtcctga

What is claimed is:

1. A mutant hydroxyphenylpyruvate dioxygenase polypeptide, which retains the activity of catalyzing the reaction of transforming 4-hydroxyphenylpyruvic acid into homogentisic acid or homogentisate and is less sensitive to an HPPD-inhibitor herbicide than the native unmutated HPPD, characterized by comprising the following mutation at a position corresponding to position 372 of the amino acid sequence as set forth in SEQ ID NO:1: F372A, F372G, F372V, F372P, F372S, F372T, F372C, F372M, F372Q, F372D, or F372 deletion;
Preferably, the mutant hydroxyphenylpyruvate dioxygenase polypeptide comprises the following mutation at a position corresponding to position 372 of the amino acid sequence as set forth in SEQ ID NO: 1: F372A, F372G or F372V.
More preferably, the mutant hydroxyphenylpyruvate dioxygenase polypeptide comprises the following mutation at a position corresponding to position 372 of the amino acid sequence as set forth in SEQ ID NO:1: F372A.

2. The mutant hydroxyphenylpyruvate dioxygenase polypeptide according to claim 1, characterized in that the mutant hydroxyphenylpyruvate dioxygenase polypeptide is derived from HPPDs in plants or microorganisms.
Preferably, the plant comprises monocotyledonous plants and dicotyledonous plants; more preferably, the plant is oats, wheat, barley, millet, corn, sorghum, Brachypodiumdistachyon, rice, tobacco, sunflower, alfalfa, soybean, cicerarietinum, peanut, sugar beet, cucumber, cotton, oilseed rape, potato, tomato or Arabidopsisthaliana;
Preferably, the microorganism is Cyanophyta, Pseudomonasfluorescens, or bacteria from the genus Sphingobium or Burkholderia.

3. The mutant hydroxyphenylpyruvate dioxygenase polypeptide according to claim 2, characterized in that, when the native unmutated HPPD has an amino acid sequence as set forth in SEQ ID NO:1, the polypeptide further comprises the following mutation at position 372 of the amino acid sequence as set forth in SEQ ID NO:1: F372L, F372I, F372W, F372N, F372E or F372K.

4. The mutant hydroxyphenylpyruvate dioxygenase polypeptide according to any of claims 1–3, 3, characterized in that the mutant hydroxyphenylpyruvate dioxygenase polypeptide comprises a second mutation;
Preferably, the second mutation at a position corresponding to position 413 of the amino acid sequence as set forth in SEQ ID NO:1 comprises the following mutation: G413W, G413H, G413M, G413F or G413C; more preferably, the second mutation at a position corresponding to position 413 of the amino acid sequence as set forth in SEQ ID NO:1 is G413W mutation;
Optionally, when the native unmutated HPPD has an amino acid sequence as set forth in SEQ ID NO:1, the second mutation at position 110 of the amino acid sequence as set forth in SEQ ID NO:1 is deletion mutation.

5. A polynucleotide encoding the mutant hydroxyphenylpyruvate dioxygenase polypeptide according to any of claims 1-4.

6. An expression cassette or a recombinant vector, characterized by comprising the polynucleotide according to claim 5 under the regulation of effectively-linked regulatory sequences.

7. A method for expanding the scope of herbicides to which the plants are tolerant, comprising expressing the mutant hydroxyphenylpyruvate dioxygenase polypeptide according to any of claims 1–4 together with at least one herbicide-tolerant protein other than the mutant hydroxyphenylpyruvate dioxygenase polypeptide according to any of claims 1–4.

8. The method for expanding the scope of herbicides to which the plants are tolerant according to claim 7, characterized in that the herbicide-tolerant protein is 5-enolpyruvylshikimate-3-phosphate synthase (EPSPS), glyphosate oxidoreductase, glyphosate-N-acetyltransferase, glyphosate decarboxylase, glufosinate acetyltransferase, alpha-ketoglutarate-dependent dioxygenase, dicamba monooxygenase, acetolactate synthase, cytochrome-like protein and/or protoporphyrinogen oxidase.

9. A method for selecting transformed plant cells, characterized by comprising transforming a plurality of plant cells with the polynucleotide according to claim 5, and cultivating the cells under a concentration of the HPPD-inhibitor herbicide that allows the growth of the transformed cells expressing the polynucleotide, while killing the untransformed cells or inhibiting the growth of the untransformed cells;
Preferably, the plant comprises monocotyledonous plants and dicotyledonous plants; more preferably, the plant is oats, wheat, barley, millet, corn, sorghum, Brachypodiumdistachyon, rice, tobacco, sunflower, alfalfa, soybean, Cicerarietinum, peanuts, sugar beet, cucumber, cotton, oilseed rape, potato, tomato or Arabidopsisthaliana;
Preferably, the HPPD-inhibitor herbicide comprises an HPPD-inhibitor herbicide from the class of pyrazolinates, triketones and/or isoxazoles; more preferably, the HPPD-inhibitor herbicide of pyrazolinates is topramezone, the HPPD-inhibitor herbicide of triketones is mesotrione, and the HPPD-inhibitor herbicide of isoxazoles is isoxaflutole.

10. A method for controlling weeds, characterized by comprising applying an effective dose of the HPPD-inhibitor herbicide to a field planting with a target plant, wherein the target plant contains the polynucleotide according to claim 5;
Preferably, the target plant comprises monocotyledonous plants and dicotyledonous plants; more preferably, the target plant is oats, wheat, barley, millet, corn, sorghum, Brachypodiumdistachyon, rice, tobacco, sunflower, alfalfa, soybean, Cicerarietinum, peanut, sugar beet, cucumber, cotton, oilseed rape, potato, tomato or Arabidopsisthaliana; further preferably, the target plant is glyphosate-tolerant plant, and the weeds are glyphosate-resistant weeds;
Preferably, the HPPD-inhibitor herbicide comprises an HPPD-inhibitor herbicide from the class of pyrazolinates, triketones and/or isoxazoles; more preferably, the HPPD-inhibitor herbicide of pyrazolinates is topramezone, the HPPD-inhibitor herbicide of triketones is mesotrione, and the HPPD-inhibitor herbicide of isoxazoles is isoxaflutole.

11. A method for protecting a plant from damages caused by an HPPD-inhibitor herbicide or for conferring tolerance to HPPD-inhibitor herbicide upon a plant, characterized by comprising introducing the polynucleotide according to claim 5 or the expression cassette or the recombinant vector according to claim 6 into the plant, resulting in an amount of the mutant hydroxyphenylpyruvate dioxygenase polypeptide that is sufficient to protect the plant into which the polynucleotide or the expression cassette or the recombinant vector has been introduced from damages caused by the HPPD-inhibitor herbicide,
Preferably, the plant comprises monocotyledonous plants and dicotyledonous plants; more preferably, the plant is oats, wheat, barley, millet, corn, sorghum, Brachypodiumdistachyon, rice, tobacco, sunflower, alfalfa, soybean, Cicerarietinum, peanut, sugar beet, cucumber, cotton, oilseed rape, potato, tomato or Arabidopsisthaliana;
Preferably, the HPPD-inhibitor herbicide comprises an HPPD-inhibitor herbicide from the class of pyrazolinates, triketones and/or isoxazoles; more preferably, the HPPD-inhibitor herbicide of pyrazolinates is topramezone, the HPPD-inhibitor herbicide of triketones is mesotrione, and the HPPD-inhibitor herbicide of isoxazoles is isoxaflutole.

12. A method for generating a plant which is tolerant to an HPPD-inhibitor herbicide, characterized by comprising introducing the polynucleotide according to claim 5 into the genome of the plant;
Preferably, the introduction method comprises genetic transformation, genome editing or gene mutation methods.
Preferably, the plant comprises monocotyledonous plants and dicotyledonous plants; more preferably, the plant is oats, wheat, barley, millet, corn, sorghum, Brachypodiumdistachyon, rice, tobacco, sunflower, alfalfa, soybean, Cicerarietinum, peanut, sugar beet, cucumber, cotton, oilseed rape, potato, tomato or Arabidopsisthaliana;
Preferably, the HPPD-inhibitor herbicide comprises an HPPD-inhibitor herbicide from the class of pyrazolinates, triketones and/or isoxazoles; more preferably, the HPPD-inhibitor herbicide of pyrazolinates is topramezone, the HPPD-inhibitor herbicide of triketones is mesotrione, and the HPPD-inhibitor herbicide of isoxazoles is isoxaflutole.

13. A method for cultivating a plant which is tolerant to an HPPD-inhibitor herbicide, characterized by comprising:
planting at least one plant propagule, wherein the plant propagule comprises in its genome the polynucleotide according to claim 5;
allowing the plant propagule to grow into a plant; and
applying an effective dose of the HPPD-inhibitor herbicide to a plant growing environment comprising at least the plant, and harvesting the plant having a reduced plant damage and/or increased plant yield compared to other plants without the polynucleotide according to claim 5;
Preferably, the plant comprises monocotyledonous plants and dicotyledonous plants; more preferably, the plant is oats, wheat, barley, millet, corn, sorghum, Brachypodiumdistachyon, rice, tobacco, sunflower, alfalfa, soybean, Cicerarietinum, peanut, sugar beet, cucumber, cotton, oilseed rape, potato, tomato or Arabidopsisthaliana;
Preferably, the HPPD-inhibitor herbicide comprises an HPPD-inhibitor herbicide from the class of pyrazolinates, triketones and/or isoxazoles; more preferably, the HPPD-inhibitor herbicide of pyrazolinates is topramezone, the HPPD-inhibitor herbicide of triketones is mesotrione, and the HPPD-inhibitor herbicide of isoxazoles is isoxaflutole.

14. A method for obtaining a processed agricultural product, characterized by comprising treating the harvested product obtained by the method according to claim 13 from the plant which is tolerant to the HPPD-inhibitor herbicide to obtain a processed agricultural product.

15. A planting system for controlling the growth of weeds, characterized by comprising an HPPD-inhibitor herbicide and a plant growing environment in which at least one target plant is present, wherein the target plant contains the polynucleotide according to claim 5;
Preferably, the target plant comprises monocotyledonous plants and dicotyledonous plants; more preferably, the target plant is oats, wheat, barley, millet, corn, sorghum, Brachypodiumdistachyon, rice, tobacco, sunflower, alfalfa, soybean, Cicerarietinum, peanut, sugar beet, cucumber, cotton, oilseed rape, potato, tomato or Arabidopsisthaliana; further preferably, the target plant is a glyphosate-tolerant plant, and the weeds are glyphosate-resistant weeds.
Preferably, the HPPD-inhibitor herbicide comprises an HPPD-inhibitor herbicide from the class of pyrazolinates, triketones and/or isoxazoles; more preferably, the HPPD-inhibitor herbicide of pyrazolinates is topramezone, the HPPD-inhibitor herbicide of triketones is mesotrione, and the HPPD-inhibitor herbicide of isoxazoles is isoxaflutole.

16. Use of the mutant hydroxyphenylpyruvate dioxygenase polypeptide according to any of claims 1–4 for conferring tolerance to an HPPD-inhibitor herbicide upon a plant;
Preferably, the plant comprises monocotyledonous plants and dicotyledonous plants; more preferably, the plant is oats, wheat, barley, millet, corn, sorghum, Brachypodiumdistachyon, rice, tobacco, sunflower, alfalfa, soybean, Cicerarietinum, peanut, sugar beet, cucumber, cotton, oilseed rape, potato, tomato or Arabidopsisthaliana;
Preferably, the HPPD-inhibitor herbicide comprises an HPPD-inhibitor herbicide from the class of pyrazolinates, triketones and/or isoxazoles; more preferably, the HPPD-inhibitor herbicide of pyrazolinates is topramezone, the HPPD-inhibitor herbicide of triketones is mesotrione, and the HPPD-inhibitor herbicide of isoxazoles is isoxaflutole.
